(19) United States
(12) Patent Application Publication
(10) Pub. No.: US 2022/0380798 A1
(43) Pub. Date: Dec. 1, 2022

(54) AAV Expression Cassette and AAV Vectors Comprising the Same

(71) Applicant: Exonics Therapeutics, Inc., Watertown, MA (US)

(72) Inventor: Nathan Jones, Watertown, MA (US)

(73) Assignee: Exonics Therapeutics, Inc., Watertown, MA (US)

(21) Appl. No.: 17/358,618

(22) Filed: Jun. 25, 2021

Related U.S. Application Data
(63) Continuation of application No. PCT/US2020/012223, filed on Jan. 3, 2020.
(60) Provisional application No. 62/788,444, filed on Jan. 4, 2019.
(60) Provisional application No. 62/852,206, filed on May 23, 2019.
(60) Provisional application No. 62/849,140, filed on May 16, 2019.

(51) Int. Cl. C12N 15/86; C12N 15/11; C12N 9/22; A61K 48/00; A61P 43/00

(52) U.S. Cl. CPC C12N 15/86; C12N 15/11; A61P 43/00; A61K 48/005; C12N 9/22

(57) ABSTRACT

The disclosure provides AAV expression cassettes for production of AAV viral vectors, wherein the expression cassettes comprise a first inverted terminal repeat (ITR); a first promoter; a first gRNA comprising a first gRNA targeting region; a second promoter; a second gRNA comprising a second gRNA targeting region; a third promoter; a third gRNA comprising a third gRNA targeting region; and a second ITR. The disclosure also provides AAV viral vectors, including self-complimentary AAVs, comprising the expression cassettes of the disclosure. The AAVs disclosed herein may be used to treat genetic diseases, such as Duchenne Muscular Dystrophy (DMD).

### CROSS REFERENCE TO RELATED APPLICATIONS

[0001] This application is a Continuation of International Application No. PCT/US2020/012223, filed Jan. 3, 2020, which claims priority to U.S. Provisional Application Ser. No. 62/852,206, filed May 23, 2019, U.S Provisional Application Ser. No. 62/849,140, filed May 16, 2019, and U.S. Provisional Application Ser. No., 62/788,444, filed Jan. 4, 2019, each of which is incorporated by reference herein in its entirety for all purposes.

### SEQUENCE LISTING

[0002] The contents of the text file submitted electronically herewith are incorporated by reference in their entirety: a computer readable format copy of the Sequence Listing (filename: 01245-0010-00US_SeqList_ST25.txt, date recorded Jan. 4, 2020, file size ˜6 MB).

### FIELD

[0003] The disclosure relates to reagents for gene delivery. More particularly, the disclosure relates to AAV expression cassettes and AAV vectors comprising the same.

### BACKGROUND

[0004] Gene editing holds great promise for treating/preventing many genetic diseases including, for example, Duchenne Muscular Dystrophy (DMD). However, safe and effective delivery of gene editing machinery into the desired cells is necessary to achieve therapeutic benefit. There remains a need in the art for compositions and methods for delivering gene editing machinery to cells in vitro and/or in vivo.

### SUMMARY

[0005] Provided herein are adeno-associated virus (AAV) expression cassettes and AAV vectors comprising the same that are useful for delivering gene editing machinery to cells in vitro and in vivo. The AAV expression cassettes and AAV vectors described herein may be used to treat and/or prevent genetic diseases, such as DMD.

[0006] In some embodiments, the disclosure provides an AAV expression cassette comprising a first inverted terminal repeat (ITR), a first promoter, a sequence encoding a first guide (gRNA) comprising a first gRNA targeting region and a scaffold region, a second promoter, a sequence encoding a second gRNA comprising a second gRNA targeting region and a scaffold region, a third promoter, a sequence encoding a third gRNA comprising a third gRNA targeting region and a scaffold region, and a second ITR, wherein the AAV expression cassette is self-complimentary. In some embodiments, the first gRNA, the second gRNA, and the third gRNA are the same.

[0007] In some embodiments, the disclosure provides an AAV expression cassette comprising a first ITR, a first promoter, a sequence encoding a first gRNA comprising a first gRNA targeting region and a scaffold region, a second promoter, a sequence encoding a second gRNA comprising a second gRNA targeting region and a scaffold sequence, a third promoter, a sequence encoding a third gRNA comprising a third gRNA targeting region and a scaffold sequence, a first stuffer sequence, and a second ITR, wherein the stuffer sequence is a 3′ UTR sequence, for example, a 3′ UTR sequence isolated or derived from a gene expressed in muscle.

[0008] The disclosure also provides vectors, including viral vectors (e.g., AAV vectors or baculovirus vectors) and non-viral vectors, comprising an AAV expression cassette.

[0009] The disclosure also provides AAV particles comprising an AAV expression cassette encapsidated by an AAV capsid protein.

[0010] The disclosure also provides methods for producing an AAV vector comprising contacting a vector comprising an AAV expression cassette with an AAV producer cell.

[0011] The disclosure also provides methods for correcting a gene defect in a cell, the method comprising contacting an AAV vector comprising an AAV expression cassette with the cell.

[0012] Also provided are methods for treating a subject in need thereof comprising administering to the subject an AAV vector comprising an AAV expression cassette. The methods may further comprise administering to the subject an AAV vector comprising an expression cassette for a nuclease (e.g., a Cas9 or Cpf1 nuclease).

[0013] These and other embodiments are addressed in more detail in the detailed description set forth below.

### BRIEF DESCRIPTION OF THE DRAWINGS

[0014] The patent or application file contains at least one drawing executed in color. Copies of this patent or patent application publication with color drawing(s) will be provided by the Office upon request and payment of the necessary fee.

[0015] FIG. 1 is a schematic drawing depicting an exemplary AAV9-H-sgRNA construct of the disclosure.

[0016] FIG. 2 is a schematic drawing depicting an exemplary AAV9-CK8e-SpCas9 construct of the disclosure.

[0017] FIG. 3A-3F shows dystrophin restoration (percent of wildtype) in quadriceps (FIG. 3A), triceps (FIG. 3B), tibialis anterior (FIG. 3C), gastrocnemius (FIG. 3D), diaphragm (FIG. 3E), and heart (FIG. 3F) at various doses of AAV-Cas9 and AAV-sgRNA. Data are represented as mean±standard deviation.

[0018] FIG. 4A-4B show editing efficiency, as determined using TIDE analysis in samples form heart (FIG. 4A) and quadriceps (FIG. 4B) at various doses of AAV-Cas9 and AAV-sgRNA. Data are represented as mean±standard deviation.

[0019] FIG. 5A-5F show tissue Cas9 expression in quadriceps (FIG. 5A), triceps (FIG. 5B), tibialis anterior (FIG. 5C), gastrocnemius (FIG. 5D), diaphragm (FIG. 5E), heart (FIG. 5F) at various doses of AAV-Cas9 and AAV-sgRNA. Data are represented as mean±standard deviation.

### DETAILED DESCRIPTION

[0020] Gene editing is a promising treatment option for many diseases, including genetic diseases such as DMD. DMD is a rare genetic disease caused by loss-of-function mutations in the dystrophin gene. An X-linked condition, the disease mostly affects boys. It usually manifests in the form of muscle weakness in children between the ages of 3 and 5. There is no cure for DMD. Steroids can slow the progression of symptoms, however the disease eventually causes life-threatening damage to the heart muscles. Few patients live beyond their 30s.

[0021] However, there remains a need in the art for effective compositions and methods for delivering genes and other therapeutic sequences to patients in need thereof.

[0022] Unless otherwise defined, all technical and scientific terms used herein have the same meaning as commonly understood by one of ordinary skill in the art to which this disclosure belongs. The terminology used in the detailed description herein is for the purpose of describing particular embodiments only and is not intended to be limiting.

[0023] All publications, patent applications, patents, GenBank or other accession numbers and other references mentioned herein are each incorporated by reference herein in their entirety.

[0024] The singular forms “a,” “an” and “the” are intended to include the plural forms as well, unless the context clearly indicates otherwise.

[0025] Furthermore, the terms “about” and “approximately” as used herein when referring to a measurable value such as an amount of the length of a polynucleotide or polypeptide sequence, dose, time, temperature, and the like, is meant to encompass variations of ±20%, ±10%, ±5%, ±1%, ±0.5%, or even ±0.1% of the specified amount.

[0026] Also as used herein, “and/or” refers to and encompasses any and all possible combinations of one or more of the associated listed items, as well as the lack of combinations when interpreted in the alternative (“or”).

[0027] Reference to a vector or other DNA sequences as “recombinant” merely acknowledges the operable linkage of DNA sequences which are not typically operably linked as isolated from or found in nature.

[0028] Unless the context indicates otherwise, it is specifically intended that the various features described herein can be used in any combination.

### AAV Expression Cassettes

[0029] The wildtype AAV genome comprises two open reading frames, Rep and Cap, flanked by two inverted terminal repeats (ITRs). Typically, when producing a recombinant AAV, the sequence between the two ITRs is replaced with one or more sequence of interest (e.g., a transgene), and the Rep and Cap sequences are provided in trans. The recombinant AAV genome construct, comprising two ITRs flanking a sequence of interest (such as a transgene), is referred to herein as an AAV expression cassette. The disclosure provides AAV expression cassettes for production of AAV viral vectors.

[0030] In some embodiments, an AAV expression cassette comprises a first ITR, a transgene sequence, and a second ITR. In some embodiments, an AAV expression cassette comprises a first ITR, an expression control sequence (such as a promoter or enhancer), a transgene sequence, and a second ITR. In some embodiments, an AAV expression cassette comprises a first ITR, an expression control sequence (such as a promoter or enhancer), a transgene sequence, a stuffer sequence, and a second ITR.

[0031] The transgene may comprise, for example, a gRNA sequence. In some embodiments, an AAV expression cassette comprises a first ITR, a gRNA sequence, and a second ITR. In some embodiments, an AAV expression cassette comprises a first ITR, an expression control sequence (such as a promoter or enhancer), a gRNA sequence, and a second ITR. In some embodiments, an AAV expression cassette comprises a first ITR, an expression control sequence (such as a promoter or enhancer), a gRNA sequence, a stuffer sequence, and a second ITR.

[0032] In some embodiments, the transgene comprises more than one guide RNA sequence, such as two, three, four, five, six, seven, or eight gRNA sequences. In some embodiments, the transgene comprises three, four or five gRNA sequences. In some embodiments, each gRNA sequence is operably linked to an expression control sequence (such as a promoter or enhancer). In some embodiments, an AAV expression cassette comprises a first ITR, a first expression control sequence (such as a promoter or enhancer), a first gRNA sequence, a second expression control sequence (such as a promoter or enhancer), a second gRNA sequence, and a second ITR. In some embodiments, an AAV expression cassette comprises a first ITR, a first expression control sequence (such as a promoter or enhancer), a first gRNA sequence, a second expression control sequence (such as a promoter or enhancer), a second gRNA sequence, a third expression control sequence (such as a promoter or enhancer), a third gRNA sequence, and a second ITR. In some embodiments, an AAV expression cassette comprises a first ITR, a first expression control sequence (such as a promoter or enhancer), a first gRNA sequence, a second expression control sequence (such as a promoter or enhancer), a second gRNA sequence, a third expression control sequence (such as a promoter or enhancer), a third gRNA sequence, a fourth expression control sequence (such as a promoter or enhancer), a fourth gRNA sequence, and a second ITR. In some embodiments, an AAV expression cassette comprises a first ITR, a first expression control sequence (such as a promoter or enhancer), a first gRNA sequence, a second expression control sequence (such as a promoter or enhancer), a second gRNA sequence, a third expression control sequence (such as a promoter or enhancer), a third gRNA sequence, a fourth expression control sequence (such as a promoter or enhancer), a fourth gRNA sequence, a fifth expression control sequence (such as a promoter or enhancer), a fifth gRNA sequence, and a second ITR. In some embodiments, all of the gRNA sequences are the same. In some embodiments, two or more of the gRNA sequences are different. In some embodiments, the AAV expression cassette further comprises a stuffer sequence.

[0033] In some embodiments, the AAV expression cassette may comprise a self-complimentary sequence, i.e. be capable of forming a self-complimentary AAV (scAAV). In some embodiments, the AAV expression cassette has been designed to form an intra-molecular double stranded DNA template. Self-complimentary AAVs are described, for example, in WO 2001/92551 and WO 2001/11034, which are incorporated by reference herein in their entireties.

[0034] In some embodiments, the AAV expression cassette is approximately one half the size of a wildtype AAV genome. In some embodiments, the AAV expression cassette forms a double-stranded DNA under appropriate conditions. In some embodiments, a sequence of the AAV expression cassette is substantially self-complimentary (i.e., at least 85%, at least 90%, at least 95%, at least 96%, at least 97%, at least 98%, at least 99% self-complimentary).

[0035] For a self-complementary expression cassette, not all bases in a single strand must be complementary to each and every base of the opposing complementary strand. There need only be a sufficient number of complementary nucleotide or nucleoside bases to enable the two polynucleotide or nucleic acid molecules to be able to specifically hybridize or bind (anneal) to each other. Hence, there may be short sequence segments or regions of non-complementary bases between the self-complementary polynucleotide or nucleic acid molecules. For example, 1-5, 5-10, 10-20, 20-30, 30-40, 40-50, 50-75, 75-100, or 100-150 or more contiguous or non-contiguous non-complementary bases may be present but there may be sufficient complementary bases over the lengths of the two sequences such that the two polynucleotide or nucleic acid molecules are able to specifically hybridize or bind (anneal) to each other and form a double-strand (or duplex) sequence. Accordingly, sequences of the two single stranded regions may be less than 100% complementary to each other and yet still be able to form a double-strand duplex molecule. In particular embodiments, two single strand sequences have at least 70%, at least 75%, at least 80%, at least 85%, at least 90%, at least 95%, at least 98%, at least 99% or more complementarity to each other.

[0036] In some embodiments, the self-complementary expression cassette is expressed faster (more rapid onset) than a single stranded transgene counterpart. Thus, such expression can be detected by measuring expression over time, such as at defined time points (e.g., 1, 2, 3, 4, 5, 6, 7, 8, 9, 10, 11, 12, 12-16, 16-20, 20-24 hours, for example). Furthermore, the amount of expression of the double stranded self-complementary expression cassette typically is greater than a single stranded reporter transgene counterpart. Thus, such expression can be detected by measuring at a point in time in which expression would be considered to be approaching or at a maximum.

[0037] In some embodiments, an AAV expression cassette comprises sequences encoding a first ITR, a first promoter, a first gRNA comprising a first gRNA targeting region, a second promoter, a second gRNA comprising a second gRNA targeting region, a third promoter, a third gRNA comprising a third gRNA targeting region; and a second ITR; wherein the AAV expression cassette is self-complimentary. At least one of the first, second, and third gRNA targeting sequences may target the dystrophin gene. In some embodiments, the first, second, and third gRNA targeting sequences are each individually selected from any one of the gRNA sequences in any one of Tables 3-14, or a sequence at least 95% identical thereto. In some embodiments, at least two of the first, second, and third gRNA targeting sequences are different. In some embodiments, the first, second, and third gRNA targeting sequences are the same. In some embodiments, the first, second, and/or third gRNA targeting sequences have a sequence that is at least 95% identical or 100% identical to the sequence of SEQ ID NO: 13.

[0038] In some embodiments, an AAV expression cassette comprises a first gRNA comprising a first gRNA targeting region, a second gRNA comprising a second gRNA targeting region, a third gRNA comprising a third gRNA targeting region, and a fourth gRNA comprising a fourth gRNA targeting region. In some embodiments, two, three, or four of the gRNAs are the same. In some embodiments, two, three, or four of the gRNAs are different. In some embodiments, an AAV expression cassette comprises a first promoter, a first gRNA comprising a first gRNA targeting region, a second promoter, a second gRNA comprising a second gRNA targeting region, a third promoter, a third gRNA comprising a third gRNA targeting region, a fourth promoter, and a fourth gRNA comprising a fourth gRNA targeting region. In some embodiments, an AAV expression cassette comprises a first ITR, a first promoter, a first gRNA comprising a first gRNA targeting region, a second promoter, a second gRNA comprising a second gRNA targeting region, a third promoter, a third gRNA comprising a third gRNA targeting region, a fourth promoter, a fourth gRNA comprising a fourth gRNA targeting region, and a second ITR. In some embodiments, the expression cassette further comprises a stuffer sequence. In some embodiments, the expression cassette is self-complimentary.

[0039] In some embodiments, an AAV expression cassette comprises a first gRNA comprising a first gRNA targeting region, a second gRNA comprising a second gRNA targeting region, a third gRNA comprising a third gRNA targeting region, a fourth gRNA comprising a fourth gRNA targeting region, and a fifth gRNA comprising a fifth gRNA targeting region. In some embodiments, two, three, four, or five of the gRNAs are the same. In some embodiments, two, three, four or five of the gRNAs are different. In some embodiments, an AAV expression cassette comprises a first promoter, a first gRNA comprising a first gRNA targeting region, a second promoter, a second gRNA comprising a second gRNA targeting region, a third promoter, a third gRNA comprising a third gRNA targeting region, a fourth promoter, a fourth gRNA comprising a fourth gRNA targeting region, a fifth promoter, and a fifth gRNA comprising a fifth gRNA targeting region. In some embodiments, an AAV expression cassette comprises a first ITR, a first promoter, a first gRNA comprising a first gRNA targeting region, a second promoter, a second gRNA comprising a second gRNA targeting region, a third promoter, a third gRNA comprising a third gRNA targeting region, a fourth promoter, a fourth gRNA comprising a fourth gRNA targeting region, a fifth promoter, a fifth gRNA comprising a fifth gRNA targeting region, and a second ITR. In some embodiments, the expression cassette further comprises a stuffer sequence. In some embodiments, the expression cassette is self-complimentary.

[0040] In some embodiments, an AAV expression cassette comprises sequences encoding a first inverted terminal repeat (ITR), a first promoter, a first gRNA comprising a first gRNA targeting region (e.g., a sequence at least 95% or 100% identical to SEQ ID NO: 13) and a scaffold region, a second promoter, a second gRNA comprising a second gRNA targeting region (e.g., a sequence at least 95% or 100% identical to SEQ ID NO: 13) and a scaffold region, a third promoter, a third gRNA comprising a third gRNA targeting region (e.g., a sequence at least 95% or 100% identical to SEQ ID NO: 13) and a scaffold region; and a second ITR; wherein the AAV expression cassette is self-complimentary.

[0041] In some embodiments, an AAV expression cassette comprises sequences encoding a first ITR, a first promoter (e.g., a sequence at least 95% or 100% identical to SEQ ID NO: 15), a first gRNA comprising a first gRNA targeting region (e.g., a sequence at least 95% or 100% identical to SEQ ID NO: 13) and a scaffold region, a second promoter (e.g., a sequence at least 95% or 100% identical to SEQ ID NO: 16), a second gRNA comprising a second gRNA targeting region (e.g., a sequence at least 95% or 100% identical to SEQ ID NO: 13) and a scaffold region, a third promoter (e.g., a sequence at least 95% or 100% identical to SEQ ID NO: 17), a third gRNA comprising a third gRNA targeting region (e.g., a sequence at least 95% or 100% identical to SEQ ID NO: 13) and a scaffold region; and a second ITR; wherein the AAV expression cassette is self-complimentary.

[0042] In some embodiments, an AAV expression cassette comprises sequences encoding a first ITR (e.g., a sequence at least 95% or 100% identical to SEQ ID NO: 1), a first promoter (e.g., a sequence at least 95% or 100% identical to SEQ ID NO: 15), a first gRNA comprising a first gRNA targeting region (e.g., a sequence at least 95% or 100% identical to SEQ ID NO: 13) and a scaffold region, a second promoter (e.g., a sequence at least 95% or 100% identical to SEQ ID NO: 16), a second gRNA comprising a second gRNA targeting region (e.g., a sequence at least 95% or 100% identical to SEQ ID NO: 13) and a scaffold region, a third promoter (e.g., a sequence at least 95% or 100% identical to SEQ ID NO: 17), a third gRNA comprising a third gRNA targeting region (e.g., a sequence at least 95% or 100% identical to SEQ ID NO: 13) and a scaffold region; and a second ITR (e.g., a sequence at least 95% or 100% identical to SEQ ID NO: 2); wherein the AAV expression cassette is self-complimentary.

[0043] In some embodiments, an AAV expression cassette comprising sequences encoding a first ITR, a first promoter, a first gRNA comprising a first gRNA targeting sequence, a second promoter, a second gRNA comprising a first gRNA targeting sequence, a third promoter, a third gRNA comprising a first gRNA targeting sequence, a first stuffer sequence, and a second ITR; wherein the stuffer sequence is a 3′ UTR sequence isolated or derived from a gene expressed in muscle (e.g., desmin).

[0044] In some embodiments, an AAV expression cassette comprises sequences encoding a first ITR, a first promoter, a first gRNA comprising a first gRNA targeting sequence, a second promoter, a second gRNA comprising a first gRNA targeting sequence, a third promoter, a third gRNA comprising a first gRNA targeting sequence, a first stuffer sequence, and a second ITR; wherein the stuffer sequence is a 3′ UTR sequence isolated or derived from a gene expressed in muscle. At least one of the first, second, and third gRNA targeting sequences may target the dystrophin gene. In some embodiments, the first, second, and third gRNA targeting sequences are each individually selected from any one of the gRNA sequences in any one of Tables 3-14 or a sequence at least 95% identical thereto. In some embodiments, at least two of the first, second, and third gRNA targeting sequences are different. In some embodiments, the first, second, and third gRNA targeting sequences are the same. In some embodiments, the first, second, and/or the third gRNA targeting sequences have a sequence that is at least 95% identical or 100% identical to the sequence of SEQ ID NO: 13.

[0045] In some embodiments, an AAV expression cassette comprises sequences encoding a first ITR, a first promoter, a first gRNA comprising a first gRNA targeting sequence (e.g., a sequence at least 95% or 100% identical to SEQ ID NO: 13), a second promoter, a second gRNA comprising a first gRNA targeting sequence (e.g., a sequence at least 95% or 100% identical to SEQ ID NO: 13), a third promoter, a third gRNA comprising a first gRNA targeting sequence (e.g., a sequence at least 95% or 100% identical to SEQ ID NO: 13), a first stuffer sequence, and a second ITR; wherein the stuffer sequence is a 3′ UTR sequence isolated or derived from a gene expressed in muscle (e.g., desmin).

[0046] In some embodiments, an AAV expression cassette comprises sequences encoding a first ITR, a first promoter (e.g., a sequence at least 95% or 100% identical to SEQ ID NO: 15), a first gRNA comprising a first gRNA targeting sequence (e.g., a sequence at least 95% or 100% identical to SEQ ID NO: 13), a second promoter (e.g., a sequence at least 95% or 100% identical to SEQ ID NO: 16), a second gRNA comprising a first gRNA targeting sequence (e.g., a sequence at least 95% or 100% identical to SEQ ID NO: 13), a third promoter (e.g., a sequence at least 95% or 100% identical to SEQ ID NO: 17), a third gRNA comprising a first gRNA targeting sequence (e.g., a sequence at least 95% or 100% identical to SEQ ID NO: 13), a first stuffer sequence, and a second ITR; wherein the stuffer sequence is a 3′ UTR sequence isolated or derived from a gene expressed in muscle (e.g., desmin).

[0047] In some embodiments, an AAV expression cassette comprises sequences encoding a first ITR (e.g., a sequence at least 95% or 100% identical to SEQ ID NO: 3), a first promoter (e.g., a sequence at least 95% or 100% identical to SEQ ID NO: 15), a first gRNA comprising a first gRNA targeting sequence (e.g., a sequence at least 95% or 100% identical to SEQ ID NO: 13), a second promoter (e.g., a sequence at least 95% or 100% identical to SEQ ID NO: 16), a second gRNA comprising a first gRNA targeting sequence (e.g., a sequence at least 95% or 100% identical to SEQ ID NO: 13), a third promoter (e.g., a sequence at least 95% or 100% identical to SEQ ID NO: 17), a third gRNA comprising a first gRNA targeting sequence (e.g., a sequence at least 95% or 100% identical to SEQ ID NO: 13), a first stuffer sequence, and a second ITR (e.g., a sequence at least 95% or 100% identical to SEQ ID NO: 12); wherein the stuffer sequence is a 3′ UTR sequence isolated or derived from a gene expressed in muscle (e.g., desmin).

[0048] In some embodiments, an AAV expression cassette comprises sequences encoding a first ITR (e.g., a sequence at least 95% or 100% identical to SEQ ID NO: 3), a first promoter (e.g., a sequence at least 95% or 100% identical to SEQ ID NO: 15), a first gRNA comprising a first gRNA targeting sequence (e.g., a sequence at least 95% or 100% identical to SEQ ID NO: 13), a second promoter (e.g., a sequence at least 95% or 100% identical to SEQ ID NO: 16), a second gRNA comprising a first gRNA targeting sequence (e.g., a sequence at least 95% or 100% identical to SEQ ID NO: 13), a third promoter (e.g., a sequence at least 95% or 100% identical to SEQ ID NO: 17), a third gRNA comprising a first gRNA targeting sequence (e.g., a sequence at least 95% or 100% identical to SEQ ID NO: 13), a first stuffer sequence (e.g., a sequence at least 95% or 100% identical to SEQ ID NO: 20), and a second ITR (e.g., a sequence at least 95% or 100% identical to SEQ ID NO: 12); wherein the stuffer sequence is a 3′ UTR sequence isolated or derived from a gene expressed in muscle (e.g., desmin).

[0049] In some embodiments, an AAV expression cassette comprises a sequence at least 95%, at least 96%, at least 97%, at least 98%, at least 99% or 100% identical to the sequence of SEQ ID NO: 25 or 26.

### ITRs

[0050] The AAV expression cassettes may comprise one or more ITR sequence. ITR sequences assist in replication, packaging into AAV particles, and efficient integration into cell chromosomes. Typically, ITRs are palindromic.

[0051] The AAV expression cassettes of the disclosure may comprise a first ITR 5′ to a sequence of interest (e.g., a gRNA) and a second ITR 3′ to the sequence of interest. The ITRs may each comprise or consist of 1 to 145 nucleotides, such as 110, 111, 112, 113, 114, 115, 116, 117, 118, 119, 120, 121, 122, 123, 124, 125, 126, 127, 128, 129, 130, 131, 132, 133, 134, 135, 136, 137, 138, 139, 140, 141, 142, 143, 144, or 145 nucleotides. In some embodiments, a first ITR and a second ITR each comprise or consist of 130 nucleotides. In some embodiments, a first ITR comprises or consists of 117 nucleotides, and a second ITR comprises or consists of 130 nucleotides. In some embodiments, a first ITR comprises or consists of 130 nucleotides, and a second ITR comprises or consists of 117 nucleotides. In some embodiments, a first ITR and a second ITR each comprise or consist of 117 nucleotides.

[0052] In some embodiments, the ITRs are isolated or derived from naturally occurring AAV sequences. For example, in some embodiments, the ITRs may each independently be isolated or derived from any one of AAV1, AAV2, AAV3, AAV4, AAV5, AAV6, AAV7, AAV8, AAV9, AAV10, AAV11, AAV12, AAVRh74, AAV2i8, AAVRh10, AAV39, AAV43, AAVRh8, avian AAV, bovine AAV, canine AAV, equine AAV, and ovine AAV. In particular embodiments, the ITRs are isolated or derived from AAV2. In some embodiments, an ITR may have a sequence that is at least 90%, at least 95%, at least 96%, at least 97%, at least 98%, or at least 99% identical to the sequence of an ITR from any one of AAV1, AAV2, AAV3, AAV4, AAV5, AAV6, AAV7, AAV8, AAV9, AAV10, AAV11, AAV12, AAVRh74, AAV2i8, AAVRh10, AAV39, AAV43, AAVRh8, avian AAV, bovine AAV, canine AAV, equine AAV, and ovine AAV. In some embodiments, an ITR may be synthetic.

[0053] Exemplary ITR sequences which may be used in the AAV expression cassettes of the disclosure are provided in Table 1 below:

TABLE 1
Exemplary ITR Sequences

| | | SEQ ID |
|---|---|---|
| 5′ or 3′ | Sequence (5′ to 3′) | NO: |
| 5′ | CCTGCAGGCAGCTGCGCGCTCGCTCGCTCACTGAGGCCGCCCGGGCAA | 1 |
| | AGCCCGGGCGTCGGGCGACCTTTGGTCGCCCGGCCTCAGTGAGCGAGC | |
| | GAGCGCGCAGAGAGGGAGTGG | |
| 5′ | CTGCGCGCTCGCTCGCTCACTGAGGCCGCCCGGGCAAAGCCCGGGCGT | 2 |
| | CGGGCGACCTTTGGTCGCCCGGCCTCAGTGAGCGAGCGAGCGCGCAGA | |
| | GAGGGAGTGGCCAACTCCATCACTAGGGGTTCCT | |
| 3′ | AGGAACCCCTAGTGATGGAGTTGGCCACTCCCTCTCTGCGCGCTCGCTC | 3 |
| | GCTCACTGAGGCCGGGCGACCAAAGGTCGCCCGACGCCCGGGCTTTGC | |
| | CCGGGCGGCCTCAGTGAGCGAGCGAGCGCGCAG | |
| 5′ | TTGGCCACTCCCTCTCTGCGCGCTCGCTCGCTCACTGAGGCCGGGCGACCAA | 27 |
| | AGGTCGCCCGACGCCCGGGCTTTGCCCGGGCGGCCTCAGTGAGCGAGCGA | |
| | GCGCGCAGAGAGGGAGTGGCCAACTCCATCACTAGGGGTTCCT | |
| 3′ | AGGAACCCCTAGTGATGGAGTTGGCCACTCCCTCTCTGCGCGCTCGCTCGCT | 28 |
| | CACTGAGGCCGCCCGGGCAAAGCCCGGGCGTCGGGCGACCTTTGGTCGCCC | |
| | GGCCTCAGTGAGCGAGCGAGCGCGCAGAGAGGGAGTGGCCAA | |

[0054] In some embodiments, an ITR has a sequence that is at least about 95%, about 96%, about 97%, about 98%, about 99%, or 100% identical to any one of SEQ ID NO: 1-3 or 27-28. In some embodiments, an ITR is a truncated form of any one of SEQ ID NO: 1-3 or 27-28. For example, an ITR may have a sequence identical to any one of SEQ ID NO: 1-3 or 27-28, except that 1 to 25 base pairs have been removed from either the 5′ end or the 3′ end of the sequence. In some embodiments, an ITR may have a sequence identical to any one of SEQ ID NO: 1-3 or 27-28, except that 1-25 base pairs have been removed from the sequence, either consecutively or at different points throughout the sequence.

[0055] In some embodiments, when packaging large coding regions into AAV vector particles, it short ITR sequences may be used in order to increase the packaging size of the AAV while maintaining efficient expression. In some embodiments, the ITR sequences enable production of a self-complimentary AAV (scAAV).

Transgenes (e.q., gRNAs)

[0056] In some embodiments, the transgene comprises a sequence encoding a guide RNA (gRNA). In some embodiments, the transgene comprises more than one gRNA sequence, such as two, three, four, five, six, seven, or eight gRNA sequences.

[0057] In some embodiments, the gRNA may be a crRNA-tracrRNA fusion transcript. In some embodiments, the gRNA may comprise a polyA tail.

[0058] The gRNAs may comprise a targeting region that is specific for a genomic sequence of interest, including coding and non-coding sequences. In some embodiments, the gRNA targeting region may be about 17-24 base pairs in length, such as about 20 base pairs in length. In some embodiments, the gRNA targeting sequence may be about 15, 16, 17, 18, 19, 20, 21, 22, 23, 24, 25, 26, 27, 28, 29, or 30 base pairs in length. In some embodiments, the gRNA targeting sequence has between about 40% to about 80% GC content.

[0059] In some embodiments, the gRNA targeting sequence targets a site that immediately precedes a 5′ protospacer adjacent motif (PAM). The PAM sequence may be selected based on the desired nuclease. For example, the PAM sequence may be any one of the PAM sequences shown in Table 2 below, wherein N refers to any nucleic acid, R refers to A or G, Y refers to C or T, W refers to A or T, and V refers to A or C or G.

TABLE 2
Nucleases and PAM sequences

| PAM | | | |
|---|---|---|---|
| sequence | | | |
| (5′ to 3′) | SEQ ID NO: | Nuclease | Isolated from |
| NGG | 4 | SpCas9 | Streptococcus pyogenes |
| NGRRT or | 5, 6 | SaCas9 | Staphylococcus aureus |
| NGRRN | | | |
| NNNNGATT | 7 | NmeCas9 | Neisseria meningitidis |
| NNNNRYAC | 8 | CjCas9 | Campylobacter jejuni |
| NNAGAAW | 9 | StCas9 | Streptococcus thermophilus |
| TTTV | 10 | LbCpf1 | Lachnospiraceae bacterium |
| TTTV | 11 | AsCpf1 | Acidaminococcus sp. |

[0060] In some embodiments, a gRNA targeting region may target a sequence of a mammalian gene, such as a human gene. In some embodiments, the gRNA targeting region may target an intronic sequence. In some embodiments, the gRNA targeting region may target an exonic sequence. In some embodiments, the gRNA may target an intron-exon junction. In some embodiments, the gRNA may target a splice site. In some embodiments, a gRNA may target a mutant gene. In some embodiments, a gRNA may target a wildtype gene.

[0061] In some embodiments, a gRNA may target the dystrophin gene. For example, the gRNA may target a wildtype or a mutant dystrophin gene. An exemplary wildtype dystrophin sequence includes the human sequence (see GenBank Accession No. NC_000023.11), located on the human X chromosome, which codes for the protein dystrophin (GenBank Accession No. AAA53189; SEQ ID NO: 12), the sequence of which is reproduced below:

| | |
|---|---|
| 1 | MLWWEEVEDC YEREDVQKKT FTKWVNAQFS KFGKQHIENL FSDLQDGRRL LDLLEGLTGQ |
| 61 | KLPKEKGSTR VHALNNVNKA LRVLQNNNVD LVNIGSTDIV DGNHKLTLGL IWNIILHWQV |
| 121 | KNVMKNIMAG LQQTNSEKIL LSWVRQSTRN YPQVNVINFT TSWSDGLALN ALIHSHRPDL |
| 181 | FDWNSVVCQQ SATQRLEHAF NIARYQLGIE KLLDPEDVDT TYPDKKSILM YITSLFQVLP |
| 241 | QQVSIEAIQE VEMLPRPPKV TKEEHFQLHH QMHYSQQITV SLAQGYERTS SPKPRFKSYA |
| 301 | YTQAAYVTTS DPTRSPFPSQ HLEAPEDKSF GSSLMESEVN LDRYQTALEE VLSWLLSAED |
| 361 | TLQAQGEISN DVEVVKDQFH THEGYMMDLT AHQGRVGNIL QLGSKLIGTG KLSEDEETEV |
| 421 | QEQMNLLNSR WECLRVASME KQSNLHRVLM DLQNQKLKEL NDWLTKTEER TRKMEEEPLG |
| 481 | PDLEDLKRQV QQHKVLQEDL EQEQVRVNSL THMVVVVDES SGDHATAALE EQLKVLGDRW |
| 541 | ANICRWTEDR WVLLQDILLK WQRLTEEQCL FSAWLSEKED AVNKIHTTGF KDQNEMLSSL |
| 601 | QKLAVLKADL EKKKQSMGKL YSLKQDLLST LKNKSVTQKT EAWLDNFARC WDNLVQKLEK |
| 661 | STAQISQAVT TTQPSLTQTT VMETVTTVTT REQILVKHAQ EELPPPPPQK KRQITVDSEI |
| 721 | RKRLDVDITE LHSWITRSEA VLQSPEFAIF RKEGNFSDLK EKVNAIEREK AEKFRKLQDA |
| 781 | SRSAQALVEQ MVNEGVNADS IKQASEQLNS RWIEFCQLLS ERLNWLEYQN NIIAFYNQLQ |
| 841 | QLEQMTTTAE NWLKIQPTTP SEPTAIKSQL KICKDEVNRL SGLQPQIERL KIQSIALKEK |
| 901 | GQGPMFLDAD FVAFTNHFKQ VFSDVQAREK ELQTIFDTLP PMRYQETMSA IRTWVQQSET |
| 961 | KLSIPQLSVT DYEIMEQRLG ELQALQSSLQ EQQSGLYYLS TTVKEMSKKA PSEISRKYQS |
| 1021 | EFEEIEGRWK KLSSQLVEHC QKLEEQMNKL RKIQNHIQTL KKWMAEVDVF LKEEWPALGD |
| 1081 | SEILKKQLKQ CRLLVSDIQT IQPSLNSVNE GGQKIKNEAE PEFASRLETE LKELNTQWDH |
| 1141 | MCQQVYARKE ALKGGLEKTV SLQKDLSEMH EWMTQAEEEY LERDFEYKTP DELQKAVEEM |
| 1201 | KRAKEEAQQK EAKVKLLTES VNSVIAQAPP VAQEALKKEL ETLTTNYQWL CTRLNGKCKT |
| 1261 | LEEVWACWHE LLSYLEKANK WLNEVEFKLK TTENIPGGAE EISEVLDSLE NLMRHSEDNP |
| 1321 | NQIRILAQTL TDGGVMDELI NEELETFNSR WRELHEEAVR RQKLLEQSIQ SAQETEKSLH |
| 1381 | LIQESLTFID KQLAAYIADK VDAAQMPQEA QKIQSDLTSH EISLEEMKKH NQGKEAAQRV |
| 1441 | LSQIDVAQKK LQDVSMKFRL FQKPANFELR LQESKMILDE VKMHLPALET KSVEQEVVQS |
| 1501 | QLNHCVNLYK SLSEVKSEVE MVIKTGRQIV QKKQTENPKE LDERVTALKL HYNELGAKVT |
| 1561 | ERKQQLEKCL KLSRKMRKEM NVLTEWLAAT DMELTKRSAV EGMPSNLDSE VAWGKATQKE |
| 1621 | IEKQKVHLKS ITEVGEALKT VLGKKETLVE DKLSLLNSNW IAVTSRAEEW LNLLLEYQKH |
| 1681 | METFDQNVDH ITKWIIQADT LLDESEKKKP QQKEDVLKRL KAELNDIRPK VDSTRDQAAN |
| 1741 | LMANRGDHCR KLVEPQISEL NHRFAAISHR IKTGKASIPL KELEQFNSDI QKLLEPLEAE |
| 1801 | IQQGVNLKEE DFNKDMNEDN EGTVKELLQR GDNLQQRITD ERKREEIKIK QQLLQTKHNA |
| 1861 | LKDLRSQRRK KALEISHQWY QYKRQADDLL KCLDDIEKKL ASLPEPRDER KIKEIDRELQ |
| 1921 | KKKEELNAVR RQAEGLSEDG AAMAVEPTQI QLSKRWREIE SKFAQFRRLN FAQIHTVREE |
| 1981 | TMMVMTEDMP LEISYVPSTY LTEITHVSQA LLEVEQLLNA PDLCAKDFED LFKQEESLKN |
| 2041 | IKDSLQQSSG RIDIIHSKKT AALQSATPVE RVKLQEALSQ LDFQWEKVNK MYKDRQGRFD |
| 2101 | RSVEKWRRFH YDIKIFNQWL TEAEQFLRKT QIPENWEHAK YKWYLKELQD GIGQRQTVVR |
| 2161 | TLNATGEEII QQSSKTDASI LQEKLGSLNL RWQEVCKQLS DRKKRLEEQK NILSEFQRDL |
| 2221 | NEFVLWLEEA DNIASIPLEP GKEQQLKEKL EQVKLLVEEL PLRQGILKQL NETGGPVLVS |
| 2281 | APISPEEQDK LENKLKQTNL QWIKVSRALP EKQGEIEAQI KDLGQLEKKL EDLEEQLNHL |
| 2341 | LLWLSPIRNQ LEIYNQPNQE GPFDVQETEI AVQAKQPDVE EILSKGQHLY KEKPATQPVK |
| 2401 | RKLEDLSSEW KAVNRLLQEL RAKQPDLAPG LTTIGASPTQ TVTLVTQPVV TKETAISKLE |
| 2461 | MPSSLMLEVP ALADFNRAWT ELTDWLSLLD QVIKSQRVMV GDLEDINEMI IKQKATMQDL |
| 2521 | EQRRPQLEEL ITAAQNLKNK TSNQEARTII TDRIERIQNQ WDEVQEHLQN RRQQLNEMLK |
| 2581 | DSTQWLEAKE EAEQVLGQAR AKLESWKEGP YTVDAIQKKI TETKQLAKDL RQWQTNVDVA |
| 2641 | NDLALKLLRD YSADDTRKVH MITENINASW RSIHKRVSER EAALEETHRL LQQFPLDLEK |
| 2701 | FLAWLTEAET TANVLQDATR KERLLEDSKG VKELMKQWQD LQGEIEAHTD VYHNLDENSQ |
| 2761 | KILRSLEGSD DAVLLQRRLD NMNFKWSELR KKSLNIRSHL EASSDQWKRL HLSLQELLVW |
| 2821 | LQLKDDELSR QAPIGGDFPA VQKQNDVHRA FKRELKTKEP VIMSTLETVR IFLTEQPLEG |
| 2881 | LEKLYQEPRE LPPEERAQNV TRLLRKQAEE VNTEWEKLNL HSADWQRKID ETLERLQELQ |
| 2941 | EATDELDLKL RQAEVIKGSW QPVGDLLIDS LQDHLEKVKA LRGEIAPLKE NVSHVNDLAR |
| 3001 | QLTTLGIQLS PYNLSTLEDL NTRWKLLQVA VEDRVRQLHE AHRDFGPASQ HFLSTSVQGP |
| 3061 | WERAISPNKV PYYINHETQT TCWDHPKMTE LYQSLADLNN VRFSAYRTAM KLRRLQKALC |
| 3121 | LDLLSLSAAC DALDQHNLKQ NDQPMDILQI INCLTTIYDR LEQEHNNLVN VPLCVDMCLN |
| 3181 | WLLNVYDTGR TGRIRVLSFK TGIISLCKAH LEDKYRYLFK QVASSTGFCD QRRLGLLLHD |
| 3241 | SIQIPRQLGE VASFGGSNIE PSVRSCFQFA NNKPEIEAAL FLDWMRLEPQ SMVWLPVLHR |
| 3301 | VAAAETAKHQ AKCNICKECP IIGFRYRSLK HFNYDICQSC FFSGRVAKGH KMHYPMVEYC |
| 3361 | TPTTSGEDVR DFAKVLKNKF RTKRYFAKHP RMGYLPVQTV LEGDNMETPV TLINFWPVDS |
| 3421 | APASSPQLSH DDTHSRIEHY ASRLAEMENS NGSYLNDSIS PNESIDDEHL LIQHYCQSLN |
| 3481 | QDSPLSQPRS PAQILISLES EERGELERIL ADLEEENRNL QAEYDRLKQQ HEHKGLSPLP |
| 3541 | SPPEMMPTSP QSPRDAELIA EAKLLRQHKG RLEARMQILE DHNKQLESQL HRLRQLLEQP |
| 3601 | QAEAKVNGTT VSSPSTSLQR SDSSQPMLLR VVGSQTSDSM GEEDLLSPPQ DTSTGLEEVM |
| 3661 | EQLNNSFPSS RGRNTPGKPM REDTM. |

[0062] In some embodiments, a gRNA targets a dystrophin intron or a dystrophin exon. In some embodiments, the gRNA targets a dystrophin splice site. In some embodiments, the gRNA targets a dystrophin splice donor site. In embodiments, the gRNA targets a dystrophin splice acceptor site.

[0063] In some embodiments, a gRNA targets DMD exon 1, 2, 3, 4, 5, 6, 7, 8, 9, 10, 11, 12, 13, 14, 15, 16, 17, 18, 19, 20, 21, 22, 23, 24, 25, 26, 27, 28, 29, 30, 31, 32, 33, 34, 35, 36, 37, 38, 39, 40, 41, 42, 43, 44, 45, 46, 47, 48, 49, 50, 51, 52, 53, 54, 55, 56, 57, 58, 59, 60, 61, 62, 63, 64, 65, 66, 67, 68, 69, 70, 71, 72, 73, 74, 75, 76, 77, 78, or 79. In some embodiments, a gRNA targets DMD exon 6, 7, 8, 43, 44, 45, 46, 50, 51, 52, 53, or 55. In some embodiments, a gRNA targets an intron immediately 5′ or immediately 3′ to DMD exon 1, 2, 3, 4, 5, 6, 7, 8, 9, 10, 11, 12, 13, 14, 15, 16, 17, 18, 19, 20, 21, 22, 23, 24, 25, 26, 27, 28, 29, 30, 31, 32, 33, 34, 35, 36, 37, 38, 39, 40, 41, 42, 43, 44, 45, 46, 47, 48, 49, 50, 51, 52, 53, 54, 55, 56, 57, 58, 59, 60, 61, 62, 63, 64, 65, 66, 67, 68, 69, 70, 71, 72, 73, 74, 75, 76, 77, 78, or 79. In some embodiments, a gRNA targets an intron immediately 5′ or immediately 3′ to DMD exon 6, 7, 8, 43, 44, 45, 46, 50, 51, 52, 53, or 55.

[0064] In some embodiments, the gRNA targeting sequence may comprise or may encode any one of the sequences shown in Tables 3-14 below. In some embodiments, the gRNA targeting sequence comprises the sequence CACCAGAGTAACAGTCTGAG (SEQ ID NO: 13), or a sequence at least 95% or at least 99% similar thereto. In some embodiments, the gRNA targeting sequence and scaffold comprise the sequence CACCAGAGTAACAGTCTGAGGTTTAAGAGCTATGCTGGAAACAGCATAGCAAGTTT AAATAAG GCTAGTCCGTTATCAACTTGAAAAAGTGGCACCGAGTCGGTGCTTTTTT T (SEQ ID NO: 14), or a sequence at least 95% or at least 99% similar thereto. In some embodiments, the gRNA targeting sequence encodes a gRNA comprising the sequence CACCAGAGUAACAGUCUGAG (SEQ ID NO: 853).

### Spacer

[0065] A spacer sequence is a short nucleic acid sequence used to target a nuclease (e.g., a Cas9 nuclease) to a specific nucleotide region of interest (e.g., a genomic DNA sequence to be cleaved).

[0066] In some embodiments, the spacer may be about 17-24 base pairs in length, such as about 20 base pairs in length. In some embodiments, the spacer may be about 15, about 16, about 17, about 18, about 19, about 20, about 21, about 22, about 23, about 24, about 25, about 26, about 27, about 28, about 29, or about 30 base pairs in length. In some embodiments, the spacer may be at least 15, at least 16, at least 17, at least 18, at least 19, at least 20, at least 21, at least 22, at least 23, at least 24, at least 25, at least 26, at least 27, at least 28, at least 29, or at least 30 base pairs in length. In some embodiments, the spacer may be 15, 16, 17, 18, 19, 20, 21, 22, 23, 24, 25, 26, 27, 28, 29, or 30 base pairs in length. In some embodiments, the spacer sequence has between about 40% to about 80% GC content.

[0067] In some embodiments, the spacer targets a site that immediately precedes a 5′ protospacer adjacent motif (PAM). The PAM sequence may be selected based on the desired nuclease. For example, the PAM sequence may be any one of the PAM sequences shown in Table 2.

[0068] In some embodiments, a spacer may target a sequence of a mammalian gene, such as a human gene. In some embodiments, the spacer may target a non-coding sequence. In some embodiments, the spacer may target a coding sequence. In some embodiments, the spacer may target an intronic sequence. In some embodiments, the spacer may target an exonic sequence. In some embodiments, the spacer may target an intron-exon junction. In some embodiments, a spacer may target an intronic splicing silencer. In some embodiments, a spacer may target an intronic splicing enhancer. In some embodiments, a spacer may target an exonic splicing silencer. In some embodiments, a spacer may target an exonic splicing enhancer. In some embodiments, a spacer may target a 5′UTR. In some embodiments, a spacer may target a 3′UTR. In some embodiments, a spacer may target a mutant gene. In some embodiments, a spacer may target a wildtype gene.

[0069] In some embodiments, a spacer may have a sequence of any one of SEQ ID NOs: 13 or 29 to 2024. In some embodiments, a spacer may have a sequence at least 90%, at least 95%, at least 96%, at least 97%, or at least 99% identical to the sequence of any one of SEQ ID NOs: 13 or 29 to 2024. In some embodiments, a spacer may have a sequence of any one of the spacers shown in Tables 3-15, or a sequence that is at least 90%, at least 95%, at least 96%, at least 97%, or at least 99% identical thereto.

TABLE 3
Exemplary gRNA targeting sequences

| | | | | SEQ ID | |
|---|---|---|---|---|---|
| Targeted gRNA Exon | Guide # | Strand | DNA Sequence* | NO | PAM |
| Human-Exon 51 | 4 | 1 | tctttttcttcttttttccttttt | 29 | tttt |
| Human-Exon 51 | 5 | 1 | ctttttcttcttttttcctttttG | 30 | tttt |
| Human-Exon 51 | 6 | 1 | tttttcttcttttttcctttttGC | 31 | tttc |
| Human-Exon 51 | 7 | 1 | tcttcttttttcctttttGCAAAA | 32 | tttt |
| Human-Exon 51 | 8 | 1 | cttcttttttcctttttGCAAAAA | 33 | tttt |
| Human-Exon 51 | 9 | 1 | ttcttttttcctttttGCAAAAAC | 34 | tttc |
| Human-Exon 51 | 10 | 1 | ttcctttttGCAAAAACCCAAAAT | 35 | tttt |
| Human-Exon 51 | 11 | 1 | tcctttttGCAAAAACCCAAAATA | 36 | tttt |
| Human-Exon 51 | 12 | 1 | cctttttGCAAAAACCCAAAATAT | 37 | tttt |
| Human-Exon 51 | 13 | 1 | ctttttGCAAAAACCCAAAATATT | 38 | tttc |
| Human-Exon 51 | 14 | 1 | tGCAAAAACCCAAAATATTTTAGC | 39 | tttt |
| Human-Exon 51 | 15 | 1 | GCAAAAACCCAAAATATTTTAGCT | 40 | tttt |
| Human-Exon 51 | 16 | 1 | CAAAAACCCAAAATATTTTAGCTC | 41 | tttG |
| Human-Exon 51 | 17 | 1 | AGCTCCTACTCAGACTGTTACTCT | 42 | TTTT |
| Human-Exon 51 | 18 | 1 | GCTCCTACTCAGACTGTTACTCTG | 43 | TTTA |
| Human-Exon 51 | 19 | −1 | CTTAGTAACCACAGGTTGTGTCAC | 44 | TTTC |
| Human-Exon 51 | 20 | −1 | GAGATGGCAGTTTCCTTAGTAACC | 45 | TTTG |
| Human-Exon 51 | 21 | −1 | TAGTTTGGAGATGGCAGTTTCCTT | 46 | TTTC |
| Human-Exon 51 | 22 | −1 | TTCTCATACCTTCTGCTTGATGAT | 47 | TTTT |
| Human-Exon 51 | 23 | −1 | TCATTTTTTCTCATACCTTCTGCT | 48 | TTTA |
| Human-Exon 51 | 24 | −1 | ATCATTTTTTCTCATACCTTCTGC | 49 | TTTT |
| Human-Exon 51 | 25 | −1 | AAGAAAAACTTCTGCCAACTTTTA | 50 | TTTA |
| Human-Exon 51 | 26 | −1 | AAAGAAAAACTTCTGCCAACTTTT | 51 | TTTT |
| Human-Exon 51 | 27 | 1 | TCTTTAAAATGAAGATTTTCCACC | 52 | TTTT |
| Human-Exon 51 | 28 | 1 | CTTTAAAATGAAGATTTTCCACCA | 53 | TTTT |
| Human-Exon 51 | 29 | 1 | TTTAAAATGAAGATTTTCCACCAA | 54 | TTTC |
| Human-Exon 51 | 30 | 1 | AAATGAAGATTTTCCACCAATCAC | 55 | TTTA |
| Human-Exon 51 | 31 | 1 | CCACCAATCACTTTACTCTCCTAG | 56 | TTTT |
| Human-Exon 51 | 32 | 1 | CACCAATCACTTTACTCTCCTAGA | 57 | TTTC |
| Human-Exon 51 | 33 | 1 | CTCTCCTAGACCATTTCCCACCAG | 58 | TTTA |
| Human-Exon 45 | 1 | −1 | agaaaagattaaacagtgtgctac | 59 | tttg |
| Human-Exon 45 | 2 | −1 | tttgagaaaagattaaacagtgtg | 60 | TTTa |
| Human-Exon 45 | 3 | −1 | atttgagaaaagattaaacagtgt | 61 | TTTT |
| Human-Exon 45 | 4 | −1 | Tatttgagaaaagattaaacagtg | 62 | TTTT |
| Human-Exon 45 | 5 | 1 | atcttttctcaaatAAAAAGACAT | 63 | ttta |
| Human-Exon 45 | 6 | 1 | ctcaaatAAAAAGACATGGGGCTT | 64 | tttt |
| Human-Exon 45 | 7 | 1 | tcaaatAAAAAGACATGGGGCTTC | 65 | tttc |
| Human-Exon 45 | 8 | 1 | TGTTTTGCCTTTTTGGTATCTTAC | 66 | TTTT |
| Human-Exon 45 | 9 | 1 | GTTTTGCCTTTTTGGTATCTTACA | 67 | TTTT |
| Human-Exon 45 | 10 | 1 | TTTTGCCTTTTTGGTATCTTACAG | 68 | TTTG |
| Human-Exon 45 | 11 | 1 | GCCTTTTTGGTATCTTACAGGAAC | 69 | TTTT |
| Human-Exon 45 | 12 | 1 | CCTTTTTGGTATCTTACAGGAACT | 70 | TTTG |
| Human-Exon 45 | 13 | 1 | TGGTATCTTACAGGAACTCCAGGA | 71 | TTTT |
| Human-Exon 45 | 14 | 1 | GGTATCTTACAGGAACTCCAGGAT | 72 | TTTT |
| Human-Exon 45 | 15 | −1 | AGGATTGCTGAATTATTTCTTCCC | 73 | TTTG |
| Human-Exon 45 | 16 | −1 | GAGGATTGCTGAATTATTTCTTCC | 74 | TTTT |
| Human-Exon 45 | 17 | −1 | TGAGGATTGCTGAATTATTTCTTC | 75 | TTTT |
| Human-Exon 45 | 18 | −1 | CTGTAGAATACTGGCATCTGTTTT | 76 | TTTC |
| Human-Exon 45 | 19 | −1 | CCTGTAGAATACTGGCATCTGTTT | 77 | TTTT |
| Human-Exon 45 | 20 | −1 | TCCTGTAGAATACTGGCATCTGTT | 78 | TTTT |
| Human-Exon 45 | 21 | −1 | CAGACCTCCTGCCACCGCAGATTC | 79 | TTTG |
| Human-Exon 45 | 22 | −1 | TGTCTGACAGCTGTTTGCAGACCT | 80 | TTTC |
| Human-Exon 45 | 23 | −1 | CTGTCTGACAGCTGTTTGCAGACC | 81 | TTTT |
| Human-Exon 45 | 24 | −1 | TCTGTCTGACAGCTGTTTGCAGAC | 82 | TTTT |
| Human-Exon 45 | 25 | −1 | TTCTGTCTGACAGCTGTTTGCAGA | 83 | TTTT |
| Human-Exon 45 | 26 | −1 | ATTCCTATTAGATCTGTCGCCCTA | 84 | TTTC |
| Human-Exon 45 | 27 | −1 | CATTCCTATTAGATCTGTCGCCCT | 85 | TTTT |
| Human-Exon 45 | 28 | 1 | AGCAGACTTTTTAAGCTTTCTTTA | 86 | TTTT |
| Human-Exon 45 | 29 | 1 | GCAGACTTTTTAAGCTTTCTTTAG | 87 | TTTA |
| Human-Exon 45 | 30 | 1 | TAAGCTTTCTTTAGAAGAATATTT | 88 | TTTT |
| Human-Exon 45 | 31 | 1 | AAGCTTTCTTTAGAAGAATATTTC | 89 | TTTT |
| Human-Exon 45 | 32 | 1 | AGCTTTCTTTAGAAGAATATTTCA | 90 | TTTA |
| Human-Exon 45 | 33 | 1 | TTTAGAAGAATATTTCATGAGAGA | 91 | TTTC |
| Human-Exon 45 | 34 | 1 | GAAGAATATTTCATGAGAGATTAT | 92 | TTTA |
| Human-Exon 44 | 1 | 1 | TCAGTATAACCAAAAAATATACGC | 93 | TTTG |
| Human-Exon 44 | 2 | 1 | acataatccatctatttttcttga | 94 | tttt |
| Human-Exon 44 | 3 | 1 | cataatccatctatttttcttgat | 95 | ttta |
| Human-Exon 44 | 4 | 1 | tcttgatccatatgcttttACCTG | 96 | tttt |
| Human-Exon 44 | 5 | 1 | cttgatccatatgcttttACCTGC | 97 | tttt |
| Human-Exon 44 | 6 | 1 | ttgatccatatgcttttACCTGCA | 98 | tttc |
| Human-Exon 44 | 7 | −1 | TCAACAGATCTGTCAAATCGCCTG | 99 | TTTC |
| Human-Exon 44 | 8 | 1 | ACCTGCAGGCGATTTGACAGATCT | 100 | tttt |
| Human-Exon 44 | 9 | 1 | CCTGCAGGCGATTTGACAGATCTG | 101 | tttA |
| Human-Exon 44 | 10 | 1 | ACAGATCTGTTGAGAAATGGCGGC | 102 | TTTG |
| Human-Exon 44 | 11 | −1 | TATCATAATGAAAACGCCGCCATT | 103 | TTTA |
| Human-Exon 44 | 12 | 1 | CATTATGATATAAAGATATTTAAT | 104 | TTTT |
| Human-Exon 44 | 13 | −1 | TATTTAGCATGTTCCCAATTCTCA | 105 | TTTG |
| Human-Exon 44 | 14 | −1 | GAAAAAACAAATCAAAGACTTACC | 106 | TTTC |
| Human-Exon 44 | 15 | 1 | ATTTGTTTTTTCGAAATTGTATTT | 107 | TTTG |
| Human-Exon 44 | 16 | 1 | TTTTTTCGAAATTGTATTTATCTT | 108 | TTTG |
| Human-Exon 44 | 17 | 1 | TTCGAAATTGTATTTATCTTCAGC | 109 | TTTT |
| Human-Exon 44 | 18 | 1 | TCGAAATTGTATTTATCTTCAGCA | 110 | TTTT |
| Human-Exon 44 | 19 | 1 | CGAAATTGTATTTATCTTCAGCAC | 111 | TTTT |
| Human-Exon 44 | 20 | 1 | GAAATTGTATTTATCTTCAGCACA | 112 | TTTC |
| Human-Exon 44 | 21 | −1 | AGAAGTTAAAGAGTCCAGATGTGC | 113 | TTTA |
| Human-Exon 44 | 22 | 1 | TCTTCAGCACATCTGGACTCTTTA | 114 | TTTA |
| Human-Exon 44 | 23 | −1 | CATCACCCTTCAGAACCTGATCTT | 115 | TTTC |
| Human-Exon 44 | 24 | 1 | ACTTCTTAAAGATCAGGTTCTGAA | 116 | TTTA |
| Human-Exon 44 | 25 | 1 | GACTGTTGTTGTCATCATTATATT | 117 | TTTT |
| Human-Exon 44 | 26 | 1 | ACTGTTGTTGTCATCATTATATTA | 118 | TTTG |
| Human-Exon 53 | 1 | −1 | AACTAGAATAAAAGGAAAAATAAA | 119 | TTTC |
| Human-Exon 53 | 2 | 1 | CTACTATATATTTATTTTTCCTTT | 120 | TTTA |
| Human-Exon 53 | 3 | 1 | TTTTTCCTTTTATTCTAGTTGAAA | 121 | TTTA |
| Human-Exon 53 | 4 | 1 | TCCTTTTATTCTAGTTGAAAGAAT | 122 | TTTT |
| Human-Exon 53 | 5 | 1 | CCTTTTATTCTAGTTGAAAGAATT | 123 | TTTT |
| Human-Exon 53 | 6 | 1 | CTTTTATTCTAGTTGAAAGAATTC | 124 | TTTC |
| Human-Exon 53 | 7 | 1 | ATTCTAGTTGAAAGAATTCAGAAT | 125 | TTTT |
| Human-Exon 53 | 8 | 1 | TTCTAGTTGAAAGAATTCAGAATC | 126 | TTTA |
| Human-Exon 53 | 9 | −1 | ATTCAACTGTTGCCTCCGGTTCTG | 127 | TTTC |
| Human-Exon 53 | 10 | −1 | ACATTTCATTCAACTGTTGCCTCC | 128 | TTTA |
| Human-Exon 53 | 11 | −1 | CTTTTGGATTGCATCTACTGTATA | 129 | TTTT |
| Human-Exon 53 | 12 | −1 | TGTGATTTTCTTTTGGATTGCATC | 130 | TTTC |
| Human-Exon 53 | 13 | −1 | ATACTAACCTTGGTTTCTGTGATT | 131 | TTTG |
| Human-Exon 53 | 14 | −1 | AAAAGGTATCTTTGATACTAACCT | 132 | TTTA |
| Human-Exon 53 | 15 | −1 | AAAAAGGTATCTTTGATACTAACC | 133 | TTTT |
| Human-Exon 53 | 16 | −1 | TTTTAAAAAGGTATCTTTGATACT | 134 | TTTA |
| Human-Exon 53 | 17 | −1 | ATTTTAAAAAGGTATCTTTGATAC | 135 | TTTT |
| Human-Exon 46 | 1 | −1 | TTAATGCAAACTGGGACACAAACA | 136 | TTTG |
| Human-Exon 46 | 2 | 1 | TAAATTGCCATGTTTGTGTCCCAG | 137 | TTTT |
| Human-Exon 46 | 3 | 1 | AAATTGCCATGTTTGTGTCCCAGT | 138 | TTTT |
| Human-Exon 46 | 4 | 1 | AATTGCCATGTTTGTGTCCCAGTT | 139 | TTTA |
| Human-Exon 46 | 5 | 1 | TGTCCCAGTTTGCATTAACAAATA | 140 | TTTG |
| Human-Exon 46 | 6 | −1 | CAACATAGTTCTCAAACTATTTGT | 141 | tttC |
| Human-Exon 46 | 7 | −1 | CCAACATAGTTCTCAAACTATTTG | 142 | tttt |
| Human-Exon 46 | 8 | −1 | tCCAACATAGTTCTCAAACTATTT | 143 | tttt |
| Human-Exon 46 | 9 | −1 | tttCCAACATAGTTCTCAAACTAT | 144 | tttt |
| Human-Exon 46 | 10 | −1 | ttttCCAACATAGTTCTCAAACTA | 145 | tttt |
| Human-Exon 46 | 11 | −1 | tttttCCAACATAGTTCTCAAACT | 146 | tttt |
| Human-Exon 46 | 12 | 1 | CATTAACAAATAGTTTGAGAACTA | 147 | TTTG |
| Human-Exon 46 | 13 | 1 | AGAACTATGTTGGaaaaaaaaaTA | 148 | TTTG |
| Human-Exon 46 | 14 | −1 | GTTCTTCTAGCCTGGAGAAAGAAG | 149 | TTTT |
| Human-Exon 46 | 15 | 1 | ATTCTTCTTTCTCCAGGCTAGAAG | 150 | TTTT |
| Human-Exon 46 | 16 | 1 | TTCTTCTTTCTCCAGGCTAGAAGA | 151 | TTTA |
| Human-Exon 46 | 17 | 1 | TCCAGGCTAGAAGAACAAAAGAAT | 152 | TTTC |
| Human-Exon 46 | 18 | −1 | AAATTCTGACAAGATATTCTTTTG | 153 | TTTG |
| Human-Exon 46 | 19 | −1 | CTTTTAGTTGCTGCTCTTTTCCAG | 154 | TTTT |
| Human-Exon 46 | 20 | −1 | AGAAAATAAAATTACCTTGACTTG | 155 | TTTG |
| Human-Exon 46 | 21 | −1 | TGCAAGCAGGCCCTGGGGGATTTG | 156 | TTTA |
| Human-Exon 46 | 22 | 1 | ATTTTCTCAAATCCCCCAGGGCCT | 157 | TTTT |
| Human-Exon 46 | 23 | 1 | TTTTCTCAAATCCCCCAGGGCCTG | 158 | TTTA |
| Human-Exon 46 | 24 | 1 | CTCAAATCCCCCAGGGCCTGCTTG | 159 | TTTT |
| Human-Exon 46 | 25 | 1 | TCAAATCCCCCAGGGCCTGCTTGC | 160 | TTTC |
| Human-Exon 46 | 26 | 1 | TTAATTCAATCATTGGTTTTCTGC | 161 | TTTT |
| Human-Exon 46 | 27 | 1 | TAATTCAATCATTGGTTTTCTGCC | 162 | TTTT |
| Human-Exon 46 | 28 | 1 | AATTCAATCATTGGTTTTCTGCCC | 163 | TTTT |
| Human-Exon 46 | 29 | 1 | ATTCAATCATTGGTTTTCTGCCCA | 164 | TTTA |
| Human-Exon 46 | 30 | −1 | GCAAGGAACTATGAATAACCTAAT | 165 | TTTA |
| Human-Exon 46 | 31 | 1 | CTGCCCATTAGGTTATTCATAGTT | 166 | TTTT |
| Human-Exon 46 | 32 | 1 | TGCCCATTAGGTTATTCATAGTTC | 167 | TTTC |
| Human-Exon 52 | 1 | −1 | TAGAAAACAATTTAACAGGAAATA | 168 | TTTA |
| Human-Exon 52 | 2 | 1 | CTGTTAAATTGTTTTCTATAAACC | 169 | TTTC |
| Human-Exon 52 | 3 | −1 | GAAATAAAAAAGATGTTACTGTAT | 170 | TTTA |
| Human-Exon 52 | 4 | −1 | AGAAATAAAAAAGATGTTACTGTA | 171 | TTTT |
| Human-Exon 52 | 5 | 1 | CTATAAACCCTTATACAGTAACAT | 172 | TTTT |
| Human-Exon 52 | 6 | 1 | TATAAACCCTTATACAGTAACATC | 173 | TTTC |
| Human-Exon 52 | 7 | 1 | TTATTTCTAAAAGTGTTTTGGCTG | 174 | TTTT |
| Human-Exon 52 | 8 | 1 | TATTTCTAAAAGTGTTTTGGCTGG | 175 | TTTT |
| Human-Exon 52 | 9 | 1 | ATTTCTAAAAGTGTTTTGGCTGGT | 176 | TTTT |
| Human-Exon 52 | 10 | 1 | TTTCTAAAAGTGTTTTGGCTGGTC | 177 | TTTA |
| Human-Exon 52 | 11 | 1 | TAAAAGTGTTTTGGCTGGTCTCAC | 178 | TTTC |
| Human-Exon 52 | 12 | −1 | CATAATACAAAGTAAAGTACAATT | 179 | TTTA |
| Human-Exon 52 | 13 | −1 | ACATAATACAAAGTAAAGTACAAT | 180 | TTTT |
| Human-Exon 52 | 14 | 1 | GGCTGGTCTCACAATTGTACTTTA | 181 | TTTT |
| Human-Exon 52 | 15 | 1 | GCTGGTCTCACAATTGTACTTTAC | 182 | TTTG |
| Human-Exon 52 | 16 | 1 | CTTTGTATTATGTAAAAGGAATAC | 183 | TTTA |
| Human-Exon 52 | 17 | 1 | TATTATGTAAAAGGAATACACAAC | 184 | TTTG |
| Human-Exon 52 | 18 | 1 | TTCTTACAGGCAACAATGCAGGAT | 185 | TTTG |
| Human-Exon 52 | 19 | 1 | GAACAGAGGCGTCCCCAGTTGGAA | 186 | TTTG |
| Human-Exon 52 | 20 | −1 | GGCAGCGGTAATGAGTTCTTCCAA | 187 | TTTG |
| Human-Exon 52 | 21 | −1 | TCAAATTTTGGGCAGCGGTAATGA | 188 | TTTT |
| Human-Exon 52 | 22 | 1 | AAAAACAAGACCAGCAATCAAGAG | 189 | TTTG |
| Human-Exon 52 | 23 | −1 | TGTGTCCCATGCTTGTTAAAAAAC | 190 | TTTG |
| Human-Exon 52 | 24 | 1 | TTAACAAGCATGGGACACACAAAG | 191 | TTTT |
| Human-Exon 52 | 25 | 1 | TAACAAGCATGGGACACACAAAGC | 192 | TTTT |
| Human-Exon 52 | 26 | 1 | AACAAGCATGGGACACACAAAGCA | 193 | TTTT |
| Human-Exon 52 | 27 | 1 | ACAAGCATGGGACACACAAAGCAA | 194 | TTTA |
| Human-Exon 52 | 28 | −1 | TTGAAACTTGTCATGCATCTTGCT | 195 | TTTA |
| Human-Exon 52 | 29 | −1 | ATTGAAACTTGTCATGCATCTTGC | 196 | TTTT |
| Human-Exon 52 | 30 | −1 | TATTGAAACTTGTCATGCATCTTG | 197 | TTTT |
| Human-Exon 52 | 31 | 1 | AATAAAAACTTAAGTTCATATATC | 198 | TTTC |
| Human-Exon 50 | 1 | −1 | GTGAATATATTATTGGATTTCTAT | 199 | TTTG |
| Human-Exon 50 | 2 | −1 | AAGATAATTCATGAACATCTTAAT | 200 | TTTG |
| Human-Exon 50 | 3 | −1 | ACAGAAAAGCATACACATTACTTA | 201 | TTTA |
| Human-Exon 50 | 4 | 1 | CTGTTAAAGAGGAAGTTAGAAGAT | 202 | TTTT |
| Human-Exon 50 | 5 | 1 | TGTTAAAGAGGAAGTTAGAAGATC | 203 | TTTC |
| Human-Exon 50 | 6 | −1 | CCGCCTTCCACTCAGAGCTCAGAT | 204 | TTTA |
| Human-Exon 50 | 7 | −1 | CCCTCAGCTCTTGAAGTAAACGGT | 205 | TTTG |
| Human-Exon 50 | 8 | 1 | CTTCAAGAGCTGAGGGCAAAGCAG | 206 | TTTA |
| Human-Exon 50 | 9 | −1 | AACAAATAGCTAGAGCCAAAGAGA | 207 | TTTG |
| Human-Exon 50 | 10 | −1 | GAACAAATAGCTAGAGCCAAAGAG | 208 | TTTT |
| Human-Exon 50 | 11 | 1 | GCTCTAGCTATTTGTTCAAAAGTG | 209 | TTTG |
| Human-Exon 50 | 12 | 1 | TTCAAAAGTGCAACTATGAAGTGA | 210 | TTTG |
| Human-Exon 50 | 13 | −1 | TCTCTCACCCAGTCATCACTTCAT | 211 | TTTC |
| Human-Exon 50 | 14 | −1 | CTCTCTCACCCAGTCATCACTTCA | 212 | TTTT |
| Human-Exon 43 | 1 | 1 | tatatatatatatatTTTTCTCTT | 213 | TTTG |
| Human-Exon 43 | 2 | 1 | TCTCTTTCTATAGACAGCTAATTC | 214 | tTTT |
| Human-Exon 43 | 3 | 1 | CTCTTTCTATAGACAGCTAATTCA | 215 | TTTT |
| Human-Exon 43 | 4 | −1 | AAACAGTAAAAAAATGAATTAGCT | 216 | TTTA |
| Human-Exon 43 | 5 | 1 | TCTTTCTATAGACAGCTAATTCAT | 217 | TTTC |
| Human-Exon 43 | 6 | −1 | AAAACAGTAAAAAAATGAATTAGC | 218 | TTTT |
| Human-Exon 43 | 7 | 1 | TATAGACAGCTAATTCATTTTTTT | 219 | TTTC |
| Human-Exon 43 | 8 | −1 | TATTCTGTAATATAAAAATTTTAA | 220 | TTTA |
| Human-Exon 43 | 9 | −1 | ATATTCTGTAATATAAAAATTTTA | 221 | TTTT |
| Human-Exon 43 | 10 | 1 | TTTACTGTTTTAAAATTTTTATAT | 222 | TTTT |
| Human-Exon 43 | 11 | 1 | TTACTGTTTTAAAATTTTTATATT | 223 | TTTT |
| Human-Exon 43 | 12 | 1 | TACTGTTTTAAAATTTTTATATTA | 224 | TTTT |
| Human-Exon 43 | 13 | 1 | ACTGTTTTAAAATTTTTATATTAC | 225 | TTTT |
| Human-Exon 43 | 14 | 1 | CTGTTTTAAAATTTTTATATTACA | 226 | TTTA |
| Human-Exon 43 | 15 | 1 | AAAATTTTTATATTACAGAATATA | 227 | TTTT |
| Human-Exon 43 | 16 | 1 | AAATTTTTATATTACAGAATATAA | 228 | TTTA |
| Human-Exon 43 | 17 | −1 | TTGTAGACTATCTTTTATATTCTG | 229 | TTTG |
| Human-Exon 43 | 18 | 1 | TATATTACAGAATATAAAAGATAG | 230 | TTTT |
| Human-Exon 43 | 19 | 1 | ATATTACAGAATATAAAAGATAGT | 231 | TTTT |
| Human-Exon 43 | 20 | 1 | TATTACAGAATATAAAAGATAGTC | 232 | TTTA |
| Human-Exon 43 | 21 | −1 | CAATGCTGCTGTCTTCTTGCTATG | 233 | TTTG |
| Human-Exon 43 | 22 | 1 | CAATGGGAAAAAGTTAACAAAATG | 234 | TTTC |
| Human-Exon 43 | 23 | −1 | TGCAAGTATCAAGAAAAATATATG | 235 | TTTC |
| Human-Exon 43 | 24 | 1 | TCTTGATACTTGCAGAAATGATTT | 236 | TTTT |
| Human-Exon 43 | 25 | 1 | CTTGATACTTGCAGAAATGATTTG | 237 | TTTT |
| Human-Exon 43 | 26 | 1 | TTGATACTTGCAGAAATGATTTGT | 238 | TTTC |
| Human-Exon 43 | 27 | 1 | TTTTCAGGGAACTGTAGAATTTAT | 239 | TTTG |
| Human-Exon 43 | 28 | −1 | CATGGAGGGTACTGAAATAAATTC | 240 | TTTC |
| Human-Exon 43 | 29 | −1 | CCATGGAGGGTACTGAAATAAATT | 241 | TTTT |
| Human-Exon 43 | 30 | 1 | CAGGGAACTGTAGAATTTATTTCA | 242 | TTTT |
| Human-Exon 43 | 31 | −1 | TCCATGGAGGGTACTGAAATAAAT | 243 | TTTT |
| Human-Exon 43 | 32 | 1 | AGGGAACTGTAGAATTTATTTCAG | 244 | TTTC |
| Human-Exon 43 | 33 | −1 | TTCCATGGAGGGTACTGAAATAAA | 245 | TTTT |
| Human-Exon 43 | 34 | −1 | CCTGTCTTTTTTCCATGGAGGGTA | 246 | TTTC |
| Human-Exon 43 | 35 | −1 | CCCTGTCTTTTTTCCATGGAGGGT | 247 | TTTT |
| Human-Exon 43 | 36 | −1 | TCCCTGTCTTTTTTCCATGGAGGG | 248 | TTTT |
| Human-Exon 43 | 37 | 1 | TTTCAGTACCCTCCATGGAAAAAA | 249 | TTTA |
| Human-Exon 43 | 38 | 1 | AGTACCCTCCATGGAAAAAAGACA | 250 | TTTC |
| Human-Exon 6 | 1 | 1 | AGTTTGCATGGTTCTTGCTCAAGG | 251 | TTTA |
| Human-Exon 6 | 2 | −1 | ATAAGAAAATGCATTCCTTGAGCA | 252 | TTTC |
| Human-Exon 6 | 3 | −1 | CATAAGAAAATGCATTCCTTGAGC | 253 | TTTT |
| Human-Exon 6 | 4 | 1 | CATGGTTCTTGCTCAAGGAATGCA | 254 | TTTG |
| Human-Exon 6 | 5 | −1 | ACCTACATGTGGAAATAAATTTTC | 255 | TTTG |
| Human-Exon 6 | 6 | −1 | GACCTACATGTGGAAATAAATTTT | 256 | TTTT |
| Human-Exon 6 | 7 | −1 | TGACCTACATGTGGAAATAAATTT | 257 | TTTT |
| Human-Exon 6 | 8 | 1 | CTTATGAAAATTTATTTCCACATG | 258 | TTTT |
| Human-Exon 6 | 9 | 1 | TTATGAAAATTTATTTCCACATGT | 259 | TTTC |
| Human-Exon 6 | 10 | −1 | ATTACATTTTTGACCTACATGTGG | 260 | TTTC |
| Human-Exon 6 | 11 | −1 | CATTACATTTTTGACCTACATGTG | 261 | TTTT |
| Human-Exon 6 | 12 | −1 | TCATTACATTTTTGACCTACATGT | 262 | TTTT |
| Human-Exon 6 | 13 | 1 | TTTCCACATGTAGGTCAAAAATGT | 263 | TTTA |
| Human-Exon 6 | 14 | 1 | CACATGTAGGTCAAAAATGTAATG | 264 | TTTC |
| Human-Exon 6 | 15 | −1 | TTGCAATCCAGCCATGATATTTTT | 265 | TTTG |
| Human-Exon 6 | 16 | −1 | ACTGTTGGTTTGTTGCAATCCAGC | 266 | TTTC |
| Human-Exon 6 | 17 | −1 | CACTGTTGGTTTGTTGCAATCCAG | 267 | TTTT |
| Human-Exon 6 | 18 | 1 | AATGCTCTCATCCATAGTCATAGG | 268 | TTTG |
| Human-Exon 6 | 19 | −1 | ATGTCTCAGTAATCTTCTTACCTA | 269 | TTTA |
| Human-Exon 6 | 20 | −1 | CAAGTTATTTAATGTCTCAGTAAT | 270 | TTTA |
| Human-Exon 6 | 21 | −1 | ACAAGTTATTTAATGTCTCAGTAA | 271 | TTTT |
| Human-Exon 6 | 22 | 1 | GACTCTGATGACATATTTTTCCCC | 272 | TTTA |
| Human-Exon 6 | 23 | 1 | TCCCCAGTATGGTTCCAGATCATG | 273 | TTTT |
| Human-Exon 6 | 24 | 1 | CCCCAGTATGGTTCCAGATCATGT | 274 | TTTT |
| Human-Exon 6 | 25 | 1 | CCCAGTATGGTTCCAGATCATGTC | 275 | TTTC |
| Human-Exon 7 | 1 | 1 | TATTTGTCTTtgtgtatgtgtgta | 276 | TTTA |
| Human-Exon 7 | 2 | 1 | TCTTtgtgtatgtgtgtatgtgta | 277 | TTTG |
| Human-Exon 7 | 3 | 1 | tgtatgtgtgtatgtgtatgtgtt | 278 | TTtg |
| Human-Exon 7 | 4 | 1 | AGGCCAGACCTATTTGACTGGAAT | 279 | ttTT |
| Human-Exon 7 | 5 | 1 | GGCCAGACCTATTTGACTGGAATA | 280 | tTTA |
| Human-Exon 7 | 6 | 1 | ACTGGAATAGTGTGGTTTGCCAGC | 281 | TTTG |
| Human-Exon 7 | 7 | 1 | CCAGCAGTCAGCCACACAACGACT | 282 | TTTG |
| Human-Exon 7 | 8 | −1 | TCTATGCCTAATTGATATCTGGCG | 283 | TTTC |
| Human-Exon 7 | 9 | −1 | CCAACCTTCAGGATCGAGTAGTTT | 284 | TTTA |
| Human-Exon 7 | 10 | 1 | TGGACTACCACTGCTTTTAGTATG | 285 | TTTC |
| Human-Exon 7 | 11 | 1 | AGTATGGTAGAGTTTAATGTTTTC | 286 | TTTT |
| Human-Exon 7 | 12 | 1 | GTATGGTAGAGTTTAATGTTTTCA | 287 | TTTA |
| Human-Exon 8 | 1 | −1 | AGACTCTAAAAGGATAATGAACAA | 288 | TTTG |
| Human-Exon 8 | 2 | 1 | ACTTTGATTTGTTCATTATCCTTT | 289 | TTTA |
| Human-Exon 8 | 3 | −1 | TATATTTGAGACTCTAAAAGGATA | 290 | TTTC |
| Human-Exon 8 | 4 | 1 | ATTTGTTCATTATCCTTTTAGAGT | 291 | TTTG |
| Human-Exon 8 | 5 | −1 | GTTTCTATATTTGAGACTCTAAAA | 292 | TTTG |
| Human-Exon 8 | 6 | −1 | GGTTTCTATATTTGAGACTCTAAA | 293 | TTTT |
| Human-Exon 8 | 7 | −1 | TGGTTTCTATATTTGAGACTCTAA | 294 | TTTT |
| Human-Exon 8 | 8 | 1 | TTCATTATCCTTTTAGAGTCTCAA | 295 | TTTG |
| Human-Exon 8 | 9 | 1 | AGAGTCTCAAATATAGAAACCAAA | 296 | TTTT |
| Human-Exon 8 | 10 | 1 | GAGTCTCAAATATAGAAACCAAAA | 297 | TTTA |
| Human-Exon 8 | 11 | −1 | CACTTCCTGGATGGCTTCAATGCT | 298 | TTTC |
| Human-Exon 8 | 12 | 1 | GCCTCAACAAGTGAGCATTGAAGC | 299 | TTTT |
| Human-Exon 8 | 13 | 1 | CCTCAACAAGTGAGCATTGAAGCC | 300 | TTTG |
| Human-Exon 8 | 14 | −1 | GGTGGCCTTGGCAACATTTCCACT | 301 | TTTA |
| Human-Exon 8 | 15 | −1 | GTCACTTTAGGTGGCCTTGGCAAC | 302 | TTTA |
| Human-Exon 8 | 16 | −1 | ATGATGTAACTGAAAATGTTCTTC | 303 | TTTG |
| Human-Exon 8 | 17 | −1 | CCTGTTGAGAATAGTGCATTTGAT | 304 | TTTA |
| Human-Exon 8 | 18 | 1 | CAGTTACATCATCAAATGCACTAT | 305 | TTTT |
| Human-Exon 8 | 19 | 1 | AGTTACATCATCAAATGCACTATT | 306 | TTTC |
| Human-Exon 8 | 20 | −1 | CACACTTTACCTGTTGAGAATAGT | 307 | TTTA |
| Human-Exon 8 | 21 | 1 | CTGTTTTATATGCATTTTTAGGTA | 308 | TTTT |
| Human-Exon 8 | 22 | 1 | TGTTTTATATGCATTTTTAGGTAT | 309 | TTTC |
| Human-Exon 8 | 23 | 1 | ATATGCATTTTTAGGTATTACGTG | 310 | TTTT |
| Human-Exon 8 | 24 | 1 | TATGCATTTTTAGGTATTACGTGC | 311 | TTTA |
| Human-Exon 8 | 25 | 1 | TAGGTATTACGTGCACatatatat | 312 | TTTT |
| Human-Exon 8 | 26 | 1 | AGGTATTACGTGCACatatatata | 313 | TTTT |
| Human-Exon 8 | 27 | 1 | GGTATTACGTGCACatatatatat | 314 | TTTA |
| Human-Exon 55 | 1 | −1 | AGCAACAACTATAATATTGTGCAG | 315 | TTTA |
| Human-Exon 55 | 2 | 1 | GTTCCTCCATCTTTCTCTTTTTAT | 316 | TTTA |
| Human-Exon 55 | 3 | 1 | TCTTTTTATGGAGTTCACTAGGTG | 317 | TTTC |
| Human-Exon 55 | 4 | 1 | TATGGAGTTCACTAGGTGCACCAT | 318 | TTTT |
| Human-Exon 55 | 5 | 1 | ATGGAGTTCACTAGGTGCACCATT | 319 | TTTT |
| Human-Exon 55 | 6 | 1 | TGGAGTTCACTAGGTGCACCATTC | 320 | TTTA |
| Human-Exon 55 | 7 | 1 | ATAATTGCATCTGAACATTTGGTC | 321 | TTTA |
| Human-Exon 55 | 8 | 1 | GTCCTTTGCAGGGTGAGTGAGCGA | 322 | TTTG |
| Human-Exon 55 | 9 | −1 | TTCCAAAGCAGCCTCTCGCTCACT | 323 | TTTC |
| Human-Exon 55 | 10 | 1 | CAGGGTGAGTGAGCGAGAGGCTGC | 324 | TTTG |
| Human-Exon 55 | 11 | 1 | GAAGAAACTCATAGATTACTGCAA | 325 | TTTG |
| Human-Exon 55 | 12 | −1 | CAGGTCCAGGGGGAACTGTTGCAG | 326 | TTTC |
| Human-Exon 55 | 13 | −1 | CCAGGTCCAGGGGGAACTGTTGCA | 327 | TTTT |
| Human-Exon 55 | 14 | −1 | AGCTTCTGTAAGCCAGGCAAGAAA | 328 | TTTC |
| Human-Exon 55 | 15 | 1 | TTGCCTGGCTTACAGAAGCTGAAA | 329 | TTTC |
| Human-Exon 55 | 16 | −1 | CTTACGGGTAGCATCCTGTAGGAC | 330 | TTTC |
| Human-Exon 55 | 17 | −1 | CTCCCTTGGAGTCTTCTAGGAGCC | 331 | TTTA |
| Human-Exon 55 | 18 | −1 | ACTCCCTTGGAGTCTTCTAGGAGC | 332 | TTTT |
| Human-Exon 55 | 19 | −1 | ATCAGCTCTTTTACTCCCTTGGAG | 333 | TTTC |
| Human-Exon 55 | 20 | 1 | CGCTTTAGCACTCTTGTGGATCCA | 334 | TTTC |
| Human-Exon 55 | 21 | 1 | GCACTCTTGTGGATCCAATTGAAC | 335 | TTTA |
| Human-Exon 55 | 22 | −1 | TCCCTGGCTTGTCAGTTACAAGTA | 336 | TTTG |
| Human-Exon 55 | 23 | −1 | GTCCCTGGCTTGTCAGTTACAAGT | 337 | TTTT |
| Human-Exon 55 | 24 | −1 | TTTTGTCCCTGGCTTGTCAGTTAC | 338 | TTTG |
| Human-Exon 55 | 25 | −1 | GTTTTGTCCCTGGCTTGTCAGTTA | 339 | TTTT |
| Human-Exon 55 | 26 | 1 | TACTTGTAACTGACAAGCCAGGGA | 340 | TTTG |
| Human-G1-exon51 | | 1 | gCTCCTACTCAGACTGTTACTCTG | 341 | TTTA |
| Human-G2-exon51 | | 1 | taccatgtattgctaaacaaagta | 342 | TTTC |
| Human-G3-exon51 | | −1 | attgaagagtaacaatttgagcca | 343 | TTTA |
| mouse-Exon23-G1 | | 1 | aggctctgcaaagttctTTGAAAG | 344 | TTTG |
| mouse-Exon23-G2 | | 1 | AAAGAGCAACAAAATGGCttcaac | 345 | TTTG |
| mouse-Exon23-G3 | | 1 | AAAGAGCAATAAAATGGCttcaac | 346 | TTTG |
| mouse-Exon23-G4 | | −1 | AAAGAACTTTGCAGAGCctcaaaa | 347 | TTTC |
| mouse-Exon23-G5 | | −1 | ctgaatatctatgcattaataact | 348 | TTTA |
| mouse-Exon23-G6 | | −1 | tattatattacagggcatattata | 349 | TTTC |
| mouse-Exon23-G7 | | 1 | Aggtaagccgaggtttggccttta | 350 | TTTC |
| mouse-Exon23-G8 | | 1 | cccagagtccttcaaagatattga | 351 | TTTA |

*In this table, upper case letters represent nucleotides that align to the exon sequence of the gene. Lower case letters represent nucleotides that align to the intron sequence of the gene.

TABLE 4
Exemplary gRNA targeting sequences

| Targeted gRNA Exon | Guide # | Strand | gRNA sequence* | SEQ ID NO. | PAM |
|---|---|---|---|---|---|
| Human-Exon 51 | 4 | −1 | aaaaaggaaaaaagaagaaaaaga | 352 | tttt |
| Human-Exon 51 | 5 | −1 | Caaaaaggaaaaaagaagaaaaag | 353 | tttt |
| Human-Exon 51 | 6 | −1 | GCaaaaaggaaaaaagaagaaaaa | 354 | tttc |
| Human-Exon 51 | 7 | −1 | UUUUGCaaaaaggaaaaaagaaga | 355 | tttt |
| Human-Exon 51 | 8 | −1 | UUUUUGCaaaaaggaaaaaagaag | 356 | tttt |
| Human-Exon 51 | 9 | −1 | GUUUUUGCaaaaaggaaaaaagaa | 357 | tttc |
| Human-Exon 51 | 10 | −1 | AUUUUGGGUUUUUGCaaaaaggaa | 358 | tttt |
| Human-Exon 51 | 11 | −1 | UAUUUUGGGUUUUUGCaaaaagga | 359 | tttt |
| Human-Exon 51 | 12 | −1 | AUAUUUUGGGUUUUUGCaaaaagg | 360 | tttt |
| Human-Exon 51 | 13 | −1 | AAUAUUUUGGGUUUUUGCaaaaag | 361 | tttc |
| Human-Exon 51 | 14 | −1 | GCUAAAAUAUUUUGGGUUUUUGCa | 362 | tttt |
| Human-Exon 51 | 15 | −1 | AGCUAAAAUAUUUUGGGUUUUUGC | 363 | tttt |
| Human-Exon 51 | 16 | −1 | GAGCUAAAAUAUUUUGGGUUUUUG | 364 | tttG |
| Human-Exon 51 | 17 | −1 | AGAGUAACAGUCUGAGUAGGAGCU | 365 | TTTT |
| Human-Exon 51 | 18 | −1 | CAGAGUAACAGUCUGAGUAGGAGC | 366 | TTTA |
| Human-Exon 51 | 19 | 1 | GUGACACAACCUGUGGUUACUAAG | 367 | TTTC |
| Human-Exon 51 | 20 | 1 | GGUUACUAAGGAAACUGCCAUCU | 368 | TTTG |
| Human-Exon 51 | 21 | 1 | AAGGAAACUGCCAUCUCCAAACUA | 369 | TTTC |
| Human-Exon 51 | 22 | 1 | AUCAUCAAGCAGAAGGUAUGAGAA | 370 | TTTT |
| Human-Exon 51 | 23 | 1 | AGCAGAAGGUAUGAGAAAAAAUGA | 371 | TTTA |
| Human-Exon 51 | 24 | 1 | GCAGAAGGUAUGAGAAAAAAUGAU | 372 | TTTT |
| Human-Exon 51 | 25 | 1 | UAAAAGUUGGCAGAAGUUUUUCUU | 373 | TTTA |
| Human-Exon 51 | 26 | 1 | AAAAGUUGGCAGAAGUUUUUCUUU | 374 | TTTT |
| Human-Exon 51 | 27 | −1 | GGUGGAAAAUCUUCAUUUUAAAGA | 375 | TTTT |
| Human-Exon 51 | 28 | −1 | UGGUGGAAAAUCUUCAUUUUAAAG | 376 | TTTT |
| Human-Exon 51 | 29 | −1 | UUGGUGGAAAAUCUUCAUUUUAAA | 377 | TTTC |
| Human-Exon 51 | 30 | −1 | GUGAUUGGUGGAAAAUCUUCAUUU | 378 | TTTA |
| Human-Exon 51 | 31 | −1 | CUAGGAGAGUAAAGUGAUUGGUGG | 379 | TTTT |
| Human-Exon 51 | 32 | −1 | UCUAGGAGAGUAAAGUGAUUGGUG | 380 | TTTC |
| Human-Exon 51 | 33 | −1 | CUGGUGGGAAAUGGUCUAGGAGA | 381 | TTTA |
| Human-Exon 45 | 1 | 1 | guagcacacuguuuaaucuuuucu | 382 | tttg |
| Human-Exon 45 | 2 | 1 | cacacuguuuaaucuuuucucaaa | 383 | TTTa |
| Human-Exon 45 | 3 | 1 | acacuguuuaaucuuuucucaaau | 384 | TTTT |
| Human-Exon 45 | 4 | 1 | cacuguuuaaucuuuucucaaauA | 385 | TTTT |
| Human-Exon 45 | 5 | −1 | AUGUCUUUUUauuugagaaaagau | 386 | ttta |
| Human-Exon 45 | 6 | −1 | AAGCCCCAUGUCUUUUUauuugag | 387 | tttt |
| Human-Exon 45 | 7 | −1 | GAAGCCCCAUGUCUUUUUauuuga | 388 | tttc |
| Human-Exon 45 | 8 | −1 | GUAAGAUACCAAAAAGGCAAAACA | 389 | TTTT |
| Human-Exon 45 | 9 | −1 | UGUAAGAUACCAAAAAGGCAAAAC | 390 | TTTT |
| Human-Exon 45 | 10 | −1 | CUGUAAGAUACCAAAAAGGCAAAA | 391 | TTTG |
| Human-Exon 45 | 11 | −1 | GUUCCUGUAAGAUACCAAAAAGGC | 392 | TTTT |
| Human-Exon 45 | 12 | −1 | AGUUCCUGUAAGAUACCAAAAAGG | 393 | TTTG |
| Human-Exon 45 | 13 | −1 | UCCUGGAGUUCCUGUAAGAUACCA | 394 | TTTT |
| Human-Exon 45 | 14 | −1 | AUCCUGGAGUUCCUGUAAGAUACC | 395 | TTTT |
| Human-Exon 45 | 15 | 1 | GGGAAGAAAUAAUUCAGCAAUCCU | 396 | TTTG |
| Human-Exon 45 | 16 | 1 | GGAAGAAAUAAUUCAGCAAUCCUC | 397 | TTTT |
| Human-Exon 45 | 17 | 1 | GAAGAAAUAAUUCAGCAAUCCUCA | 398 | TTTT |
| Human-Exon 45 | 18 | 1 | AAAACAGAUGCCAGUAUUCUACAG | 399 | TTTC |
| Human-Exon 45 | 19 | 1 | AAACAGAUGCCAGUAUUCUACAGG | 400 | TTTT |
| Human-Exon 45 | 20 | 1 | AACAGAUGCCAGUAUUCUACAGGA | 401 | TTTT |
| Human-Exon 45 | 21 | 1 | GAAUCUGCGGUGGCAGGAGGUCUG | 402 | TTTG |
| Human-Exon 45 | 22 | 1 | AGGUCUGCAAACAGCUGUCAGACA | 403 | TTTC |
| Human-Exon 45 | 23 | 1 | GGUCUGCAAACAGCUGUCAGACAG | 404 | TTTT |
| Human-Exon 45 | 24 | 1 | GUCUGCAAACAGCUGUCAGACAGA | 405 | TTTT |
| Human-Exon 45 | 25 | 1 | UCUGCAAACAGCUGUCAGACAGAA | 406 | TTTT |
| Human-Exon 45 | 26 | 1 | UAGGGCGACAGAUCUAAUAGGAAU | 407 | TTTC |
| Human-Exon 45 | 27 | 1 | AGGGCGACAGAUCUAAUAGGAAUG | 408 | TTTT |
| Human-Exon 45 | 28 | −1 | UAAAGAAAGCUUAAAAAGUCUGCU | 409 | TTTT |
| Human-Exon 45 | 29 | −1 | CUAAAGAAAGCUUAAAAAGUCUGC | 410 | TTTA |
| Human-Exon 45 | 30 | −1 | AAAUAUUCUUCUAAAGAAAGCUUA | 411 | TTTT |
| Human-Exon 45 | 31 | −1 | GAAAUAUUCUUCUAAAGAAAGCUU | 412 | TTTT |
| Human-Exon 45 | 32 | −1 | UGAAAUAUUCUUCUAAAGAAAGCU | 413 | TTTA |
| Human-Exon 45 | 33 | −1 | UCUCUCAUGAAAUAUUCUUCUAAA | 414 | TTTC |
| Human-Exon 45 | 34 | −1 | AUAAUCUCUCAUGAAAUAUUCUUC | 415 | TTTA |
| Human-Exon 44 | 1 | −1 | GCGUAUAUUUUUUGGUUAUACUGA | 416 | TTTG |
| Human-Exon 44 | 2 | −1 | ucaagaaaaauagauggauuaugu | 417 | tttt |
| Human-Exon 44 | 3 | −1 | aucaagaaaaauagauggauuaug | 418 | ttta |
| Human-Exon 44 | 4 | −1 | CAGGUaaaagcauauggaucaaga | 419 | tttt |
| Human-Exon 44 | 5 | −1 | GCAGGUaaaagcauauggaucaag | 420 | tttt |
| Human-Exon 44 | 6 | −1 | UGCAGGUaaaagcauauggaucaa | 421 | tttc |
| Human-Exon 44 | 7 | 1 | CAGGCGAUUUGACAGAUCUGUUGA | 422 | TTTC |
| Human-Exon 44 | 8 | −1 | AGAUCUGUCAAAUCGCCUGCAGGU | 423 | tttt |
| Human-Exon 44 | 9 | −1 | CAGAUCUGUCAAAUCGCCUGCAGG | 424 | tttA |
| Human-Exon 44 | 10 | −1 | GCCGCCAUUUCUCAACAGAUCUGU | 425 | TTTG |
| Human-Exon 44 | 11 | 1 | AAUGGCGGCGUUUUCAUUAUGAUA | 426 | TTTA |
| Human-Exon 44 | 12 | −1 | AUUAAAUAUCUUUAUAUCAUAAUG | 427 | TTTT |
| Human-Exon 44 | 13 | 1 | UGAGAAUUGGGAACAUGCUAAAUA | 428 | TTTG |
| Human-Exon 44 | 14 | 1 | GGUAAGUCUUUGAUUUGUUUUUUC | 429 | TTTC |
| Human-Exon 44 | 15 | −1 | AAAUACAAUUUCGAAAAAACAAAU | 430 | TTTG |
| Human-Exon 44 | 16 | −1 | AAGAUAAAUACAAUUUCGAAAAAA | 431 | TTTG |
| Human-Exon 44 | 17 | −1 | GCUGAAGAUAAAUACAAUUUCGAA | 432 | TTTT |
| Human-Exon 44 | 18 | −1 | UGCUGAAGAUAAAUACAAUUUCGA | 433 | TTTT |
| Human-Exon 44 | 19 | −1 | GUGCUGAAGAUAAAUACAAUUUCG | 434 | TTTT |
| Human-Exon 44 | 20 | −1 | UGUGCUGAAGAUAAAUACAAUUUC | 435 | TTTC |
| Human-Exon 44 | 21 | 1 | GCACAUCUGGACUCUUUAACUUCU | 436 | TTTA |
| Human-Exon 44 | 22 | −1 | UAAAGAGUCCAGAUGUGCUGAAGA | 437 | TTTA |
| Human-Exon 44 | 23 | −1 | AAGAUCAGGUUCUGAAGGGUGAUG | 438 | TTTC |
| Human-Exon 44 | 24 | −1 | UUCAGAACCUGAUCUUUAAGAAGU | 439 | TTTA |
| Human-Exon 44 | 25 | −1 | AAUAUAAUGAUGACAACAACAGUC | 440 | TTTT |
| Human-Exon 44 | 26 | −1 | UAAUAUAAUGAUGACAACAACAGU | 441 | TTTG |
| Human-Exon 53 | 1 | 1 | UUUAUUUUUCCUUUUAUUCUAGUU | 442 | TTTC |
| Human-Exon 53 | 2 | −1 | AAAGGAAAAAUAAAUAUAUAGUAG | 443 | TTTA |
| Human-Exon 53 | 3 | −1 | UUUCAACUAGAAUAAAAGGAAAAA | 444 | TTTA |
| Human-Exon 53 | 4 | −1 | AUUCUUUCAACUAGAAUAAAAGGA | 445 | TTTT |
| Human-Exon 53 | 5 | −1 | AAUUCUUUCAACUAGAAUAAAAGG | 446 | TTTT |
| Human-Exon 53 | 6 | −1 | GAAUUCUUUCAACUAGAAUAAAAG | 447 | TTTC |
| Human-Exon 53 | 7 | −1 | AUUCUGAAUUCUUUCAACUAGAAU | 448 | TTTT |
| Human-Exon 53 | 8 | −1 | GAUUCUGAAUUCUUUCAACUAGAA | 449 | TTTA |
| Human-Exon 53 | 9 | 1 | CAGAACCGGAGGCAACAGUUGAAU | 450 | TTTC |
| Human-Exon 53 | 10 | 1 | GGAGGCAACAGUUGAAUGAAAUGU | 451 | TTTA |
| Human-Exon 53 | 11 | 1 | UAUACAGUAGAUGCAAUCCAAAAG | 452 | TTTT |
| Human-Exon 53 | 12 | 1 | GAUGCAAUCCAAAAGAAAAUCACA | 453 | TTTC |
| Human-Exon 53 | 13 | 1 | AAUCACAGAAACCAAGGUUAGUAU | 454 | TTTG |
| Human-Exon 53 | 14 | 1 | AGGUUAGUAUCAAAGAUACCUUU | 455 | TTTA |
| Human-Exon 53 | 15 | 1 | GGUUAGUAUCAAAGAUACCUUUUU | 456 | TTTT |
| Human-Exon 53 | 16 | 1 | AGUAUCAAAGAUACCUUUUUAAAA | 457 | TTTA |
| Human-Exon 53 | 17 | 1 | GUAUCAAAGAUACCUUUUUAAAAU | 458 | TTTT |
| Human-Exon 46 | 1 | 1 | UGUUUGUGUCCCAGUUUGCAUUAA | 459 | TTTG |
| Human-Exon 46 | 2 | −1 | CUGGGACACAAACAUGGCAAUUUA | 460 | TTTT |
| Human-Exon 46 | 3 | −1 | ACUGGGACACAAACAUGGCAAUUU | 461 | TTTT |
| Human-Exon 46 | 4 | −1 | AACUGGGACACAAACAUGGCAAUU | 462 | TTTA |
| Human-Exon 46 | 5 | −1 | UAUUUGUUAAUGCAAACUGGGACA | 463 | TTTG |
| Human-Exon 46 | 6 | 1 | ACAAAUAGUUUGAGAACUAUGUUG | 464 | tttC |
| Human-Exon 46 | 7 | 1 | CAAAUAGUUUGAGAACUAUGUUGG | 465 | tttt |
| Human-Exon 46 | 8 | 1 | AAAUAGUUUGAGAACUAUGUUGGa | 466 | tttt |
| Human-Exon 46 | 9 | 1 | AUAGUUUGAGAACUAUGUUGGaaa | 467 | tttt |
| Human-Exon 46 | 10 | 1 | UAGUUUGAGAACUAUGUUGGaaaa | 468 | tttt |
| Human-Exon 46 | 11 | 1 | AGUUUGAGAACUAUGUUGGaaaaa | 469 | tttt |
| Human-Exon 46 | 12 | −1 | UAGUUCUCAAACUAUUUGUUAAUG | 470 | TTTG |
| Human-Exon 46 | 13 | −1 | UAuuuuuuuuuCCAACAUAGUUCU | 471 | TTTG |
| Human-Exon 46 | 14 | 1 | CUUCUUUCUCCAGGCUAGAAGAAC | 472 | TTTT |
| Human-Exon 46 | 15 | −1 | CUUCUAGCCUGGAGAAAGAAGAAU | 473 | TTTT |
| Human-Exon 46 | 16 | −1 | UCUUCUAGCCUGGAGAAAGAAGAA | 474 | TTTA |
| Human-Exon 46 | 17 | −1 | AUUCUUUUGUUCUUCUAGCCUGGA | 475 | TTTC |
| Human-Exon 46 | 18 | 1 | CAAAAGAAUAUCUUGUCAGAAUUU | 476 | TTTG |
| Human-Exon 46 | 19 | 1 | CUGGAAAAGAGCAGCAACUAAAAG | 477 | TTTT |
| Human-Exon 46 | 20 | 1 | CAAGUCAAGGUAAUUUUAUUUUCU | 478 | TTTG |
| Human-Exon 46 | 21 | 1 | CAAAUCCCCCAGGGCCUGCUUGCA | 479 | TTTA |
| Human-Exon 46 | 22 | −1 | AGGCCCUGGGGGAUUUGAGAAAAU | 480 | TTTT |
| Human-Exon 46 | 23 | −1 | CAGGCCCUGGGGGAUUUGAGAAAA | 481 | TTTA |
| Human-Exon 46 | 24 | −1 | CAAGCAGGCCCUGGGGGAUUUGAG | 482 | TTTT |
| Human-Exon 46 | 25 | −1 | GCAAGCAGGCCCUGGGGGAUUUGA | 483 | TTTC |
| Human-Exon 46 | 26 | −1 | GCAGAAAACCAAUGAUUGAAUUAA | 484 | TTTT |
| Human-Exon 46 | 27 | −1 | GGCAGAAAACCAAUGAUUGAAUUA | 485 | TTTT |
| Human-Exon 46 | 28 | −1 | GGGCAGAAAACCAAUGAUUGAAUU | 486 | TTTT |
| Human-Exon 46 | 29 | −1 | UGGGCAGAAAACCAAUGAUUGAAU | 487 | TTTA |
| Human-Exon 46 | 30 | 1 | AUUAGGUUAUUCAUAGUUCCUUGC | 488 | TTTA |
| Human-Exon 46 | 31 | −1 | AACUAUGAAUAACCUAAUGGGCAG | 489 | TTTT |
| Human-Exon 46 | 32 | −1 | GAACUAUGAAUAACCUAAUGGGCA | 490 | TTTC |
| Human-Exon 52 | 1 | 1 | UAUUUCCUGUUAAAUUGUUUUCUA | 491 | TTTA |
| Human-Exon 52 | 2 | −1 | GGUUUAUAGAAAACAAUUUAACAG | 492 | TTTC |
| Human-Exon 52 | 3 | 1 | AUACAGUAACAUCUUUUUUAUUUC | 493 | TTTA |
| Human-Exon 52 | 4 | 1 | UACAGUAACAUCUUUUUUAUUUCU | 494 | TTTT |
| Human-Exon 52 | 5 | −1 | AUGUUACUGUAUAAGGGUUUAUAG | 495 | TTTT |
| Human-Exon 52 | 6 | −1 | GAUGUUACUGUAUAAGGGUUUAUA | 496 | TTTC |
| Human-Exon 52 | 7 | −1 | CAGCCAAAACACUUUUAGAAAUAA | 497 | TTTT |
| Human-Exon 52 | 8 | −1 | CCAGCCAAAACACUUUUAGAAAUA | 498 | TTTT |
| Human-Exon 52 | 9 | −1 | ACCAGCCAAAACACUUUUAGAAAU | 499 | TTTT |
| Human-Exon 52 | 10 | −1 | GACCAGCCAAAACACUUUUAGAAA | 500 | TTTA |
| Human-Exon 52 | 11 | −1 | GUGAGACCAGCCAAAACACUUUUA | 501 | TTTC |
| Human-Exon 52 | 12 | 1 | AAUUGUACUUUACUUUGUAUUAUG | 502 | TTTA |
| Human-Exon 52 | 13 | 1 | AUUGUACUUUACUUUGUAUUAUGU | 503 | TTTT |
| Human-Exon 52 | 14 | −1 | UAAAGUACAAUUGUGAGACCAGCC | 504 | TTTT |
| Human-Exon 52 | 15 | −1 | GUAAAGUACAAUUGUGAGACCAGC | 505 | TTTG |
| Human-Exon 52 | 16 | −1 | GUAUUCCUUUUACAUAAUACAAAG | 506 | TTTA |
| Human-Exon 52 | 17 | −1 | GUUGUGUAUUCCUUUUACAUAAUA | 507 | TTTG |
| Human-Exon 52 | 18 | −1 | AUCCUGCAUUGUUGCCUGUAAGAA | 508 | TTTG |
| Human-Exon 52 | 19 | −1 | UUCCAACUGGGGACGCCUCUGUUC | 509 | TTTG |
| Human-Exon 52 | 20 | 1 | UUGGAAGAACUCAUUACCGCUGCC | 510 | TTTG |
| Human-Exon 52 | 21 | 1 | UCAUUACCGCUGCCCAAAAUUUGA | 511 | TTTT |
| Human-Exon 52 | 22 | −1 | CUCUUGAUUGCUGGUCUUGUUUUU | 512 | TTTG |
| Human-Exon 52 | 23 | 1 | GUUUUUUAACAAGCAUGGGACACA | 513 | TTTG |
| Human-Exon 52 | 24 | −1 | CUUUGUGUGUCCCAUGCUUGUUAA | 514 | TTTT |
| Human-Exon 52 | 25 | −1 | GCUUUGUGUGUCCCAUGCUUGUUA | 515 | TTTT |
| Human-Exon 52 | 26 | −1 | UGCUUUGUGUGUCCCAUGCUUGUU | 516 | TTTT |
| Human-Exon 52 | 27 | −1 | UUGCUUUGUGUGUCCCAUGCUUGU | 517 | TTTA |
| Human-Exon 52 | 28 | 1 | AGCAAGAUGCAUGACAAGUUUCAA | 518 | TTTA |
| Human-Exon 52 | 29 | 1 | GCAAGAUGCAUGACAAGUUUCAAU | 519 | TTTT |
| Human-Exon 52 | 30 | 1 | CAAGAUGCAUGACAAGUUUCAAUA | 520 | TTTT |
| Human-Exon 52 | 31 | −1 | GAUAUAUGAACUUAAGUUUUUAUU | 521 | TTTC |
| Human-Exon 50 | 1 | 1 | AUAGAAAUCCAAUAAUAUAUUCAC | 522 | TTTG |
| Human-Exon 50 | 2 | 1 | AUUAAGAUGUUCAUGAAUUAUCUU | 523 | TTTG |
| Human-Exon 50 | 3 | 1 | UAAGUAAUGUGUAUGCUUUUCUGU | 524 | TTTA |
| Human-Exon 50 | 4 | −1 | AUCUUCUAACUUCCUCUUUAACAG | 525 | TTTT |
| Human-Exon 50 | 5 | −1 | GAUCUUCUAACUUCCUCUUUAACA | 526 | TTTC |
| Human-Exon 50 | 6 | 1 | AUCUGAGCUCUGAGUGGAAGGCGG | 527 | TTTA |
| Human-Exon 50 | 7 | 1 | ACCGUUUACUUCAAGAGCUGAGGG | 528 | TTTG |
| Human-Exon 50 | 8 | −1 | CUGCUUUGCCCUCAGCUCUUGAAG | 529 | TTTA |
| Human-Exon 50 | 9 | 1 | UCUCUUUGGCUCUAGCUAUUUGUU | 530 | TTTG |
| Human-Exon 50 | 10 | 1 | CUCUUUGGCUCUAGCUAUUUGUUC | 531 | TTTT |
| Human-Exon 50 | 11 | −1 | CACUUUUGAACAAAUAGCUAGAGC | 532 | TTTG |
| Human-Exon 50 | 12 | −1 | UCACUUCAUAGUUGCACUUUUGAA | 533 | TTTG |
| Human-Exon 50 | 13 | 1 | AUGAAGUGAUGACUGGGUGAGAGA | 534 | TTTC |
| Human-Exon 50 | 14 | 1 | UGAAGUGAUGACUGGGUGAGAGAG | 535 | TTTT |
| Human-Exon 43 | 1 | −1 | AAGAGAAAAauauauauauauaua | 536 | TTTG |
| Human-Exon 43 | 2 | −1 | GAAUUAGCUGUCUAUAGAAAGAGA | 537 | tTTT |
| Human-Exon 43 | 3 | −1 | UGAAUUAGCUGUCUAUAGAAAGAG | 538 | TTTT |
| Human-Exon 43 | 4 | 1 | AGCUAAUUCAUUUUUUUACUGUUU | 539 | TTTA |
| Human-Exon 43 | 5 | −1 | AUGAAUUAGCUGUCUAUAGAAAGA | 540 | TTTC |
| Human-Exon 43 | 6 | 1 | GCUAAUUCAUUUUUUUACUGUUUU | 541 | TTTT |
| Human-Exon 43 | 7 | −1 | AAAAAAAUGAAUUAGCUGUCUAUA | 542 | TTTC |
| Human-Exon 43 | 8 | 1 | UUAAAAUUUUUAUAUUACAGAAUA | 543 | TTTA |
| Human-Exon 43 | 9 | 1 | UAAAAUUUUUAUAUUACAGAAUAU | 544 | TTTT |
| Human-Exon 43 | 10 | −1 | AUAUAAAAAUUUUAAAACAGUAAA | 545 | TTTT |
| Human-Exon 43 | 11 | −1 | AAUAUAAAAAUUUUAAAACAGUAA | 546 | TTTT |
| Human-Exon 43 | 12 | −1 | UAAUAUAAAAAUUUUAAAACAGUA | 547 | TTTT |
| Human-Exon 43 | 13 | −1 | GUAAUAUAAAAAUUUUAAAACAGU | 548 | TTTT |
| Human-Exon 43 | 14 | −1 | UGUAAUAUAAAAAUUUUAAAACAG | 549 | TTTA |
| Human-Exon 43 | 15 | −1 | UAUAUUCUGUAAUAUAAAAAUUUU | 550 | TTTT |
| Human-Exon 43 | 16 | −1 | UUAUAUUCUGUAAUAUAAAAAUUU | 551 | TTTA |
| Human-Exon 43 | 17 | 1 | CAGAAUAUAAAAGAUAGUCUACAA | 552 | TTTG |
| Human-Exon 43 | 18 | −1 | CUAUCUUUUAUAUUCUGUAAUAUA | 553 | TTTT |
| Human-Exon 43 | 19 | −1 | ACUAUCUUUUAUAUUCUGUAAUAU | 554 | TTTT |
| Human-Exon 43 | 20 | −1 | GACUAUCUUUUAUAUUCUGUAAUA | 555 | TTTA |
| Human-Exon 43 | 21 | 1 | CAUAGCAAGAAGACAGCAGCAUUG | 556 | TTTG |
| Human-Exon 43 | 22 | −1 | CAUUUUGUUAACUUUUUCCCAUUG | 557 | TTTC |
| Human-Exon 43 | 23 | 1 | CAUAUAUUUUUCUUGAUACUUGCA | 558 | TTTC |
| Human-Exon 43 | 24 | −1 | AAAUCAUUUCUGCAAGUAUCAAGA | 559 | TTTT |
| Human-Exon 43 | 25 | −1 | CAAAUCAUUUCUGCAAGUAUCAAG | 560 | TTTT |
| Human-Exon 43 | 26 | −1 | ACAAAUCAUUUCUGCAAGUAUCAA | 561 | TTTC |
| Human-Exon 43 | 27 | −1 | AUAAAUUCUACAGUUCCCUGAAAA | 562 | TTTG |
| Human-Exon 43 | 28 | 1 | GAAUUUAUUUCAGUACCCUCCAUG | 563 | TTTC |
| Human-Exon 43 | 29 | 1 | AAUUUAUUUCAGUACCCUCCAUGG | 564 | TTTT |
| Human-Exon 43 | 30 | −1 | UGAAAUAAAUUCUACAGUUCCCUG | 565 | TTTT |
| Human-Exon 43 | 31 | 1 | AUUUAUUUCAGUACCCUCCAUGGA | 566 | TTTT |
| Human-Exon 43 | 32 | −1 | CUGAAAUAAAUUCUACAGUUCCCU | 567 | TTTC |
| Human-Exon 43 | 33 | 1 | UUUAUUUCAGUACCCUCCAUGGAA | 568 | TTTT |
| Human-Exon 43 | 34 | 1 | UACCCUCCAUGGAAAAAAGACAGG | 569 | TTTC |
| Human-Exon 43 | 35 | 1 | ACCCUCCAUGGAAAAAAGACAGGG | 570 | TTTT |
| Human-Exon 43 | 36 | 1 | CCCUCCAUGGAAAAAAGACAGGGA | 571 | TTTT |
| Human-Exon 43 | 37 | −1 | UUUUUUCCAUGGAGGGUACUGAAA | 572 | TTTA |
| Human-Exon 43 | 38 | −1 | UGUCUUUUUUCCAUGGAGGGUACU | 573 | TTTC |
| Human-Exon 6 | 1 | −1 | CCUUGAGCAAGAACCAUGCAAACU | 574 | TTTA |
| Human-Exon 6 | 2 | 1 | UGCUCAAGGAAUGCAUUUUCUUAU | 575 | TTTC |
| Human-Exon 6 | 3 | 1 | GCUCAAGGAAUGCAUUUUCUUAUG | 576 | TTTT |
| Human-Exon 6 | 4 | −1 | UGCAUUCCUUGAGCAAGAACCAUG | 577 | TTTG |
| Human-Exon 6 | 5 | 1 | GAAAAUUUAUUUCCACAUGUAGGU | 578 | TTTG |
| Human-Exon 6 | 6 | 1 | AAAAUUUAUUUCCACAUGUAGGUC | 579 | TTTT |
| Human-Exon 6 | 7 | 1 | AAAUUUAUUUCCACAUGUAGGUCA | 580 | TTTT |
| Human-Exon 6 | 8 | −1 | CAUGUGGAAAUAAAUUUUCAUAAG | 581 | TTTT |
| Human-Exon 6 | 9 | −1 | ACAUGUGGAAAUAAAUUUUCAUAA | 58 | TTTC |
| Human-Exon 6 | 10 | 1 | CCACAUGUAGGUCAAAAAUGUAAU | 583 | TTTC |
| Human-Exon 6 | 11 | 1 | CACAUGUAGGUCAAAAAUGUAAUG | 584 | TTTT |
| Human-Exon 6 | 12 | 1 | ACAUGUAGGUCAAAAAUGUAAUGA | 585 | TTTT |
| Human-Exon 6 | 13 | −1 | ACAUUUUUGACCUACAUGUGGAAA | 586 | TTTA |
| Human-Exon 6 | 14 | −1 | CAUUACAUUUUUGACCUACAUGUG | 587 | TTTC |
| Human-Exon 6 | 15 | 1 | AAAAAUAUCAUGGCUGGAUUGCAA | 588 | TTTG |
| Human-Exon 6 | 16 | 1 | GCUGGAUUGCAACAAACCAACAGU | 589 | TTTC |
| Human-Exon 6 | 17 | 1 | CUGGAUUGCAACAAACCAACAGUG | 590 | TTTT |
| Human-Exon 6 | 18 | −1 | CCUAUGACUAUGGAUGAGAGCAUU | 591 | TTTG |
| Human-Exon 6 | 19 | 1 | UAGGUAAGAAGAUUACUGAGACAU | 592 | TTTA |
| Human-Exon 6 | 20 | 1 | AUUACUGAGACAUUAAAUAACUUG | 593 | TTTA |
| Human-Exon 6 | 21 | 1 | UUACUGAGACAUUAAAUAACUUGU | 594 | TTTT |
| Human-Exon 6 | 22 | −1 | GGGGAAAAAUAUGUCAUCAGAGUC | 595 | TTTA |
| Human-Exon 6 | 23 | −1 | CAUGAUCUGGAACCAUACUGGGGA | 596 | TTTT |
| Human-Exon 6 | 24 | −1 | ACAUGAUCUGGAACCAUACUGGGG | 597 | TTTT |
| Human-Exon 6 | 25 | −1 | GACAUGAUCUGGAACCAUACUGGG | 598 | TTTC |
| Human-Exon 7 | 1 | −1 | uacacacauacacaAAGACAAAUA | 599 | TTTA |
| Human-Exon 7 | 2 | −1 | uacacauacacacauacacaAAGA | 600 | TTTG |
| Human-Exon 7 | 3 | −1 | aacacauacacauacacacauaca | 601 | TTtg |
| Human-Exon 7 | 4 | −1 | AUUCCAGUCAAAUAGGUCUGGCCU | 602 | ttTT |
| Human-Exon 7 | 5 | −1 | UAUUCCAGUCAAAUAGGUCUGGCC | 603 | tTTA |
| Human-Exon 7 | 6 | −1 | GCUGGCAAACCACACUAUUCCAGU | 604 | TTTG |
| Human-Exon 7 | 7 | −1 | AGUCGUUGUGUGGCUGACUGCUGG | 605 | TTTG |
| Human-Exon 7 | 8 | 1 | CGCCAGAUAUCAAUUAGGCAUAGA | 606 | TTTC |
| Human-Exon 7 | 9 | 1 | AAACUACUCGAUCCUGAAGGUUGG | 607 | TTTA |
| Human-Exon 7 | 10 | −1 | CAUACUAAAAGCAGUGGUAGUCCA | 608 | TTTC |
| Human-Exon 7 | 11 | −1 | GAAAACAUUAAACUCUACCAUACU | 609 | TTTT |
| Human-Exon 7 | 12 | −1 | UGAAAACAUUAAACUCUACCAUAC | 610 | TTTA |
| Human-Exon 8 | 1 | 1 | UUGUUCAUUAUCCUUUUAGAGUCU | 611 | TTTG |
| Human-Exon 8 | 2 | −1 | AAAGGAUAAUGAACAAAUCAAAGU | 612 | TTTA |
| Human-Exon 8 | 3 | 1 | UAUCCUUUUAGAGUCUCAAAUAUA | 613 | TTTC |
| Human-Exon 8 | 4 | −1 | ACUCUAAAAGGAUAAUGAACAAAU | 614 | TTTG |
| Human-Exon 8 | 5 | 1 | UUUUAGAGUCUCAAAUAUAGAAAC | 615 | TTTG |
| Human-Exon 8 | 6 | 1 | UUUAGAGUCUCAAAUAUAGAAACC | 616 | TTTT |
| Human-Exon 8 | 7 | 1 | UUAGAGUCUCAAAUAUAGAAACCA | 617 | TTTT |
| Human-Exon 8 | 8 | −1 | UUGAGACUCUAAAAGGAUAAUGAA | 618 | TTTG |
| Human-Exon 8 | 9 | −1 | UUUGGUUUCUAUAUUUGAGACUCU | 619 | TTTT |
| Human-Exon 8 | 10 | −1 | UUUUGGUUUCUAUAUUUGAGACUC | 620 | TTTA |
| Human-Exon 8 | 11 | 1 | AGCAUUGAAGCCAUCCAGGAAGUG | 621 | TTTC |
| Human-Exon 8 | 12 | −1 | GCUUCAAUGCUCACUUGUUGAGGC | 622 | TTTT |
| Human-Exon 8 | 13 | −1 | GGCUUCAAUGCUCACUUGUUGAGG | 623 | TTTG |
| Human-Exon 8 | 14 | 1 | AGUGGAAAUGUUGCCAAGGCCACC | 624 | TTTA |
| Human-Exon 8 | 15 | 1 | GUUGCCAAGGCCACCUAAAGUGAC | 625 | TTTA |
| Human-Exon 8 | 16 | 1 | GAAGAACAUUUUCAGUUACAUCAU | 626 | TTTG |
| Human-Exon 8 | 17 | 1 | AUCAAAUGCACUAUUCUCAACAGG | 627 | TTTA |
| Human-Exon 8 | 18 | −1 | AUAGUGCAUUUGAUGAUGUAACUG | 628 | TTTT |
| Human-Exon 8 | 19 | −1 | AAUAGUGCAUUUGAUGAUGUAACU | 629 | TTTC |
| Human-Exon 8 | 20 | 1 | ACUAUUCUCAACAGGUAAAGUGUG | 630 | TTTA |
| Human-Exon 8 | 21 | −1 | UACCUAAAAAUGCAUAUAAAACAG | 631 | TTTT |
| Human-Exon 8 | 22 | −1 | AUACCUAAAAAUGCAUAUAAAACA | 632 | TTTC |
| Human-Exon 8 | 23 | −1 | CACGUAAUACCUAAAAAUGCAUAU | 633 | TTTT |
| Human-Exon 8 | 24 | −1 | GCACGUAAUACCUAAAAAUGCAUA | 634 | TTTA |
| Human-Exon 8 | 25 | −1 | auauauauGUGCACGUAAUACCUA | 635 | TTTT |
| Human-Exon 8 | 26 | −1 | uauauauauGUGCACGUAAUACCU | 636 | TTTT |
| Human-Exon 8 | 27 | −1 | auauauauauGUGCACGUAAUACC | 637 | TTTA |
| Human-Exon 55 | 1 | 1 | CUGCACAAUAUUAUAGUUGUUGCU | 638 | TTTA |
| Human-Exon 55 | 2 | −1 | AUAAAAAGAGAAAGAUGGAGGAAC | 638 | TTTA |
| Human-Exon 55 | 3 | −1 | CACCUAGUGAACUCCAUAAAAAGA | 640 | TTTC |
| Human-Exon 55 | 4 | −1 | AUGGUGCACCUAGUGAACUCCAUA | 641 | TTTT |
| Human-Exon 55 | 5 | −1 | AAUGGUGCACCUAGUGAACUCCAU | 642 | TTTT |
| Human-Exon 55 | 6 | −1 | GAAUGGUGCACCUAGUGAACUCCA | 643 | TTTA |
| Human-Exon 55 | 7 | −1 | GACCAAAUGUUCAGAUGCAAUUAU | 644 | TTTA |
| Human-Exon 55 | 8 | −1 | UCGCUCACUCACCCUGCAAAGGAC | 645 | TTTG |
| Human-Exon 55 | 9 | 1 | AGUGAGCGAGAGGCUGCUUUGGAA | 646 | TTTC |
| Human-Exon 55 | 10 | −1 | GCAGCCUCUCGCUCACUCACCCUG | 647 | TTTG |
| Human-Exon 55 | 11 | −1 | UUGCAGUAAUCUAUGAGUUUCUUC | 648 | TTTG |
| Human-Exon 55 | 12 | 1 | CUGCAACAGUUCCCCCUGGACCUG | 649 | TTTC |
| Human-Exon 55 | 13 | 1 | UGCAACAGUUCCCCCUGGACCUGG | 650 | TTTT |
| Human-Exon 55 | 14 | 1 | UUUCUUGCCUGGCUUACAGAAGCU | 651 | TTTC |
| Human-Exon 55 | 15 | −1 | UUUCAGCUUCUGUAAGCCAGGCAA | 652 | TTTC |
| Human-Exon 55 | 16 | 1 | GUCCUACAGGAUGCUACCCGUAAG | 653 | TTTC |
| Human-Exon 55 | 17 | 1 | GGCUCCUAGAAGACUCCAAGGGAG | 654 | TTTA |
| Human-Exon 55 | 18 | 1 | GCUCCUAGAAGACUCCAAGGGAGU | 655 | TTTT |
| Human-Exon 55 | 19 | 1 | CUCCAAGGGAGUAAAAGAGCUGAU | 656 | TTTC |
| Human-Exon 55 | 20 | −1 | UGGAUCCACAAGAGUGCUAAAGCG | 657 | TTTC |
| Human-Exon 55 | 21 | −1 | GUUCAAUUGGAUCCACAAGAGUGC | 658 | TTTA |
| Human-Exon 55 | 22 | 1 | UACUUGUAACUGACAAGCCAGGGA | 659 | TTTG |
| Human-Exon 55 | 23 | 1 | ACUUGUAACUGACAAGCCAGGGAC | 660 | TTTT |
| Human-Exon 55 | 24 | 1 | GUAACUGACAAGCCAGGGACAAAA | 661 | TTTG |
| Human-Exon 55 | 25 | 1 | UAACUGACAAGCCAGGGACAAAAC | 662 | TTTT |
| Human-Exon 55 | 26 | −1 | UCCCUGGCUUGUCAGUUACAAGUA | 663 | TTTG |
| Human-G1-exon51 | | −1 | CAGAGUAACAGUCUGAGUAGGAGc | 664 | TTTA |
| Human-G2-exon51 | | −1 | uacuuuguuuagcaauacauggua | 665 | TTTC |
| Human-G3-exon51 | | 1 | uggcucaaauuguuacucuucaau | 666 | TTTA |
| mouse-Exon23-G1 | | −1 | CUUUCAAagaacuuugcagagccu | 667 | TTTG |
| mouse-Exon23-G2 | | −1 | guugaaGCCAUUUUGUUGCUCUUU | 668 | TTTG |
| mouse-Exon23-G3 | | −1 | guugaaGCCAUUUUAUUGCUCUUU | 669 | TTTG |
| mouse-Exon23-G4 | | 1 | uuuugagGCUCUGCAAAGUUCUUU | 670 | TTTC |
| mouse-Exon23-G5 | | 1 | aguuauuaaugcauagauauucag | 671 | TTTA |
| mouse-Exon23-G6 | | 1 | uauaauaugcccuguaauauaaua | 672 | TTTC |
| mouse-Exon23-G7 | | −1 | uaaaggccaaaccucggcuuaccU | 673 | TTTC |
| mouse-Exon23-G8 | | −1 | ucaauaucuuugaaggacucuggg | 674 | TTTA |

*In this table, upper case letters represent sgRNA nucleotides that align to the exon sequence of the gene. Lower case letters represent sgRNA nucleotides that align to the intron sequence of the gene.

TABLE 5
Exemplary gRNA targeting sequences for
targeting mouse Dmd Exon 51

| | | | SEQ | |
|---|---|---|---|---|
| | | | ID | |
| ID gRNA | Strand | sgRNA | NO: | PAM |
| Ex51-SA1 | 3′ | AGAGTAACAGTCTGACTGG | 675 | CAG |
| Ex51-SD | 5′ | GAAATGATCATCAAACAGA | 676 | AGG |
| Ex51-SA-2 | 3′ | CACTAGAGTAACAGTCTGAC | 677 | TGG |

TABLE 6
Exemplary gRNAs targeting mouse Dmd Exon 51

| | | | SEQ | |
|---|---|---|---|---|
| | | | ID | |
| ID gRNA | Strand | sgRNA | NO: | PAM |
| Ex51-SA1 | 3′ | CCAGUCAGACUGUUACUCU | 678 | CAG |
| Ex51-SD | 5′ | UCUGUUUGAUGAUCAUUUC | 679 | AGG |
| Ex51-SA-2 | 3′ | GUCAGACUGUUACUCUAGUG | 680 | TGG |
| Ex51-SA1′ | 3′ | AGAGUAACAGUCUGACUGG | 681 | CAG |
| Ex51-SD′ | 5′ | GAAAUGAUCAUCAAACAGA | 682 | AGG |
| Ex51-SA-2′ | 3′ | CACUAGAGUAACAGUCUGAC | 683 | TGG |

TABLE 7
Exemplary gRNAs targeting human Dmd Exon 51

| | | | SEQ ID | |
|---|---|---|---|---|
| ID gRNA | Strand | sgRNA | NO: | PAM |
| Ex51-SA | 3′ | AGAGTAACAGTCTGAGTAG | 684 | GAG |
| Ex51-SD | 5′ | GAGATGATCATCAAGCAGA | 685 | AGG |
| Ex51-SA-2 | 3′ | CACCAGAGTAACAGTCTGAG | 686 | TAG |

TABLE 8
gRNA sequences for targeting human Dmd Exon 51

| | | | SEQ ID | |
|---|---|---|---|---|
| ID gRNA | Strand | sgRNA | NO: | PAM |
| Ex51-SA | 3′ | CUACUCAGACUGUUACUCU | 687 | GAG |
| Ex51-SD | 5′ | UCUGCUUGAUGAUCAUCUC | 688 | AGG |
| Ex51-SA-2 | 3′ | CUCAGACUGUUACUCUGGUG | 689 | TAG |
| Ex51-SA′ | 3′ | AGAGUAACAGUCUGAGUAG | 690 | GAG |
| Ex51-SD′ | 5′ | GAGAUGAUCAUCAAGCAGA | 691 | AGG |
| Ex51-SA-2′ | 3′ | CACCAGAGUAACAGUCUGAG | 692 | TAG |

TABLE 9
gRNAs Targeting sites in various human Dmd Exons

| | | | SEQ | |
|---|---|---|---|---|
| | | | ID | |
| ID gRNA | Strand | sgRNA | NO: | PAM |
| Exon50-#1 | 3′ | TAGTGGTCAGTCCAGGAGCT | 693 | AGG |
| Exon50-#2 | 3′ | GCTCCAATAGTGGTCAGTCC | 694 | AGG |
| Exon50-#3 | 5′ | GCTCCTGGACTGACCACTAT | 695 | TGG |
| Exon50-#4 | 3′ | ATACTTACAGGCTCCAATAG | 696 | TGG |
| Exon50-#5 | 3′ | ATGGGATCCAGTATACTTAC | 697 | AGG |
| Exon50-#6 | 5′ | ATTGGAGCCTGTAAGTATAC | 698 | TGG |
| Exon51-#1 | 3′ | CAGAGTAACAGTCTGAGTAG | 699 | GAG |
| Exon51-#2 | 3′ | CACCAGAGTAACAGTCTGAG | 700 | TAG |
| Exon51-#3 | 3′ | TATTTTGGGTTTTTGCAAAA | 701 | AGG |
| Exon51-#4 | 3′ | AGTAGGAGCTAAAATATTTT | 702 | GGG |
| Exon51-#5 | 3′ | GAGTAGGAGCTAAAATATTT | 703 | TGG |
| Exon51-#6 | 3′ | ACCAGAGTAACAGTCTGAGT | 704 | AGG |
| Exon51-#7 | 5′ | TCCTACTCAGACTGTTACTC | 705 | TGG |
| Exon51-#8 | 5′ | TACTCTGGTGACACAACCTG | 706 | TGG |
| Exon51-#9 | 3′ | GCAGTTTCCTTAGTAACCAC | 707 | AGG |
| Exon51-#10 | 5′ | GACACAACCTGTGGTTACTA | 708 | AGG |
| Exon51-#11 | 3′ | TGTCACCAGAGTAACAGTCT | 709 | GAG |
| Exon51-#12 | 3′ | AGGTTGTGTCACCAGAGTAA | 710 | CAG |
| Exon51-#13 | 3′ | AACCACAGGTTGTGTCACCA | 711 | GAG |
| Exon51-#14 | 3′ | GTAACCACAGGTTGTGTCAC | 712 | CAG |
| Exon53-#1 | 5′ | ATTTATTTTTCCTTTTATTC | 713 | TAG |
| Exon53-#2 | 5′ | TTTCCTTTTATTCTAGTTGA | 714 | AAG |
| Exon53-#3 | 3′ | TGATTCTGAATTCTTTCAAC | 715 | TAG |
| Exon53-#4 | 3′ | AATTCTTTCAACTAGAATAA | 716 | AAG |
| Exon53-#6 | 5′ | TTATTCTAGTTGAAAGAATT | 717 | CAG |
| Exon53-#7 | 5′ | TAGTTGAAAGAATTCAGAAT | 718 | CAG |
| Exon53-#8 | 5′ | AATTCAGAATCAGTGGGATG | 719 | AAG |
| Exon53-#9 | 3′ | ATTCTTTCAACTAGAATAAA | 720 | AGG |
| Exon53-#10 | 5′ | TTGAAAGAATTCAGAATCAG | 721 | TGG |
| Exon53-#11 | 5′ | TGAAAGAATTCAGAATCAGT | 722 | GGG |
| Exon53-#12 | 3′ | ACTGTTGCCTCCGGTTCTGA | 723 | AGG |
| Exon44-#1 | 3′ | CAGATCTGTCAAATCGCCTG | 724 | CAG |
| Exon44-#2 | 3′ | AAAACGCCGCCATTTCTCAA | 725 | CAG |
| Exon44-#3 | 3′ | AGATCTGTCAAATCGCCTGC | 726 | AGG |
| Exon44-#4 | 3′ | TATGGATCAAGAAAAATAGA | 727 | TGG |
| Exon44-#5 | 3′ | CGCCTGCAGGTAAAAGCATA | 728 | TGG |
| Exon44-#6 | 5′ | ATCCATATGCTTTTACCTGC | 729 | AGG |
| Exon44-#8 | 5′ | TTGACAGATCTGTTGAGAAA | 730 | TGG |
| Exon44-#9 | 5′ | ACAGATCTGTTGAGAAATGG | 731 | CGG |
| Exon44-#11 | 5′ | GGCGATTTGACAGATCTGTT | 732 | GAG |
| Exon44-#13 | 5′ | GGCGTTTTCATTATGATATA | 733 | AAG |
| Exon44-#14 | 5′ | ATGATATAAAGATATTTAAT | 734 | CAG |
| Exon44-#15 | 5′ | GATATTTAATCAGTGGCTAA | 735 | CAG |
| Exon44-#16 | 5′ | ATTTAATCAGTGGCTAACAG | 736 | AAG |
| Exon44-#17 | 3′ | AGAAACTGTTCAGCTTCTGT | 737 | TAG |
| Exon44-#1 | 5′ | GGGAACATGCTAAATACAAA | 738 | TGG |
| Exon44-#2 | 5′ | TAAATACAAATGGTATCTTA | 739 | AGG |
| Exon43-#1 | 5′ | GTTTTAAAATTTTTATATTA | 740 | CAG |
| Exon43-#2 | 5′ | TTTTATATTACAGAATATAA | 741 | AAG |
| Exon43-#3 | 5′ | ATATTACAGAATATAAAAGA | 742 | TAG |
| Exon45-#1 | 3′ | GTTCCTGTAAGATACCAAAA | 743 | AGG |
| Exon45-#2 | 5′ | TTGCCTTTTTGGTATCTTAC | 744 | AGG |
| Exon45-#3 | 5′ | TGGTATCTTACAGGAACTCC | 745 | AGG |
| Exon45-#4 | 5′ | ATCTTACAGGAACTCCAGGA | 746 | TGG |
| Exon45-#4.1 | 5′ | CTTACAGGAACTCCAGGA | 2356 | TGG |
| Exon45-#5 | 3′ | GCCGCTGCCCAATGCCATCC | 747 | TGG |
| Exon45-#6 | 5′ | CAGGAACTCCAGGATGGCAT | 748 | TGG |
| Exon45-#7 | 5′ | AGGAACTCCAGGATGGCATT | 749 | GGG |
| Exon45-#8 | 5′ | TCCAGGATGGCATTGGGCAG | 750 | CGG |
| Exon45-#9 | 5′ | GTCAGAACATTGAATGCAAC | 751 | TGG |
| Exon45-#10 | 3′ | AGTTCCTGTAAGATACCAAA | 752 | AAG |
| Exon45-#11 | 3′ | TGCCATCCTGGAGTTCCTGT | 753 | AAG |
| Exon45-#12 | 5′ | TTGGTATCTTACAGGAACTC | 754 | CAG |
| Exon45-#13 | 3′ | CGCTGCCCAATGCCATCCTG | 755 | GAG |
| Exon45-#14 | 5′ | AACTCCAGGATGGCATTGGG | 756 | CAG |
| Exon45-#15 | 5′ | GGGCAGCGGCAAACTGTTGT | 757 | CAG |
| Exon46-#1 | 3′ | ATTCTTTTGTTCTTCTAGCC | 758 | TGG |
| Exon46-#2 | 3′ | TGCTCTTTTCCAGGTTCAAG | 759 | GGG |
| Exon46-#3 | 5′ | GCTAGTATCCCACTTGAACC | 760 | TGG |
| Exon46-#4 | 3′ | TTTAGTTGCTGCTCTTTTCC | 761 | TGG |
| Exon46-#5 | 5′ | AGAAAAGCTTGAGCAAGTCA | 762 | AGG |
| Exon52-#1 | 3′ | AGATCTGTCAAATCGCCTGC | 763 | AGG |
| Exon52-#2 | 3′ | AATCCTGCATTGTTGCCTGT | 764 | AAG |
| Exon52-#3 | 5′ | CGCTGAAGAACCCTGATACT | 765 | AAG |
| Exon52-#4 | 3′ | GAACAAATATCCCTTAGTAT | 766 | CAG |
| Exon52-#5 | 3′ | CTGTAAGAACAAATATCCCT | 767 | TAG |
| Exon52-#6 | 5′ | CTAAGGGATATTTGTTCTTA | 768 | CAG |
| Exon52-#8 | 5′ | TGTTCTTACAGGCAACAATG | 769 | CAG |
| Exon52-#9 | 5′ | CAACAATGCAGGATTTGGAA | 770 | CAG |
| Exon52-#10 | 5′ | ACAATGCAGGATTTGGAACA | 771 | GAG |
| Exon52-#11 | 5′ | ATTTGGAACAGAGGCGTCCC | 772 | CAG |
| Exon52-#12 | 5′ | ACAGAGGCGTCCCCAGTTGG | 773 | AAG |
| Exon2-#1 | 5′ | TATTTTTTTATTTTGCATTT | 774 | TAG |
| Exon2-#2 | 5′ | TTATTTTGCATTTTAGATGA | 775 | AAG |
| Exon2-#3 | 5′ | ATTTTGCATTTTAGATGAAA | 776 | GAG |
| Exon2-#4 | 5′ | TTGCATTTTAGATGAAAGAG | 777 | AAG |
| Exon2-#5 | 5′ | ATGAAAGAGAAGATGTTCAA | 778 | AAG |

TABLE 10
gRNA sequences for targeting sites in
various human DMD Exons

| | | | SEQ | |
|---|---|---|---|---|
| | | | ID | |
| ID sgRNA | Strand | sgRNA | NO: | PAM |
| Exon51-#1 | 3′ | CUACUCAGACUGUUACUCUG | 779 | GAG |
| Exon51-#2 | 3′ | CUCAGACUGUUACUCUGGUG | 780 | TAG |
| Exon51-#3 | 3′ | UUUUGCAAAAACCCAAAAUA | 781 | AGG |
| Exon51-#4 | 3′ | AAAAUAUUUUAGCUCCUACU | 782 | GGG |
| Exon51-#5 | 3′ | AAAUAUUUUAGCUCCUACUC | 783 | TGG |
| Exon51-#6 | 3′ | ACUCAGACUGUUACUCUGGU | 784 | AGG |
| Exon51-#7 | 5′ | GAGUAACAGUCUGAGUAGGA | 785 | TGG |
| Exon51-#8 | 5′ | CAGGUUGUGUCACCAGAGUA | 786 | TGG |
| Exon51-#9 | 3′ | GUGGUUACUAAGGAAACUGC | 787 | AGG |
| Exon51-#10 | 5′ | UAGUAACCACAGGUUGUGUC | 788 | AGG |
| Exon51-#11 | 3′ | AGACUGUUACUCUGGUGACA | 789 | GAG |
| Exon51-#12 | 3′ | UUACUCUGGUGACACAACCU | 790 | CAG |
| Exon51-#13 | 3′ | UGGUGACACAACCUGUGGUU | 791 | GAG |
| Exon51-#14 | 3′ | GUGACACAACCUGUGGUUAC | 792 | CAG |
| Exon53-#1 | 5′ | GAAUAAAAGGAAAAAUAAAU | 793 | TAG |
| Exon53-#2 | 5′ | UCAACUAGAAUAAAAGGAAA | 794 | AAG |
| Exon53-#3 | 3′ | GUUGAAAGAAUUCAGAAUCA | 795 | TAG |
| Exon53-#4 | 3′ | UUAUUCUAGUUGAAAGAAUU | 796 | AAG |
| Exon53-#6 | 5′ | AAUUCUUUCAACUAGAAUAA | 797 | CAG |
| Exon53-#7 | 5′ | AUUCUGAAUUCUUUCAACUA | 798 | CAG |
| Exon53-#8 | 5′ | CAUCCCACUGAUUCUGAAUU | 799 | AAG |
| Exon53-#9 | 3′ | UUUAUUCUAGUUGAAAGAAU | 800 | AGG |
| Exon53-#10 | 5′ | CUGAUUCUGAAUUCUUUCAA | 801 | TGG |
| Exon53-#11 | 5′ | ACUGAUUCUGAAUUCUUUCA | 802 | GGG |
| Exon53-#12 | 3′ | UCAGAACCGGAGGCAACAGU | 803 | AGG |
| Exon44-#1 | 3′ | CAGGCGAUUUGACAGAUCUG | 804 | CAG |
| Exon44-#2 | 3′ | UUGAGAAAUGGCGGCGUUUU | 805 | CAG |
| Exon44-#3 | 3′ | GCAGGCGAUUUGACAGAUCU | 806 | AGG |
| Exon44-#4 | 3′ | UCUAUUUUUCUUGAUCCAUA | 807 | TGG |
| Exon44-#5 | 3′ | UAUGCUUUUACCUGCAGGCG | 808 | TGG |
| Exon44-#6 | 5′ | GCAGGUAAAAGCAUAUGGAU | 809 | AGG |
| Exon44-#8 | 5′ | UUUCUCAACAGAUCUGUCAA | 810 | TGG |
| Exon44-#9 | 5′ | CCAUUUCUCAACAGAUCUGU | 811 | CGG |
| Exon44-#11 | 5′ | AACAGAUCUGUCAAAUCGCC | 812 | GAG |
| Exon44-#13 | 5′ | UAUAUCAUAAUGAAAACGCC | 813 | AAG |
| Exon44-#14 | 5′ | AUUAAAUAUCUUUAUAUCAU | 814 | CAG |
| Exon44-#15 | 5′ | UUAGCCACUGAUUAAAUAUC | 815 | CAG |
| Exon44-#16 | 5′ | CUGUUAGCCACUGAUUAAAU | 816 | AAG |
| Exon44-#17 | 3′ | ACAGAAGCUGAACAGUUUCU | 817 | TAG |
| Exon43-#1 | 5′ | UAAUAUAAAAAUUUUAAAAC | 818 | CAG |
| Exon43-#2 | 5′ | UUAUAUUCUGUAAUAUAAAA | 819 | AAG |
| Exon43-#3 | 5′ | UCUUUUAUAUUCUGUAAUAU | 820 | TAG |
| Exon45-#1 | 3′ | UUUUGGUAUCUUACAGGAAC | 821 | AGG |
| Exon45-#2 | 5′ | GUAAGAUACCAAAAAGGCAA | 822 | AGG |
| Exon45-#3 | 5′ | GGAGUUCCUGUAAGAUACCA | 823 | AGG |
| Exon45-#4 | 5′ | UCCUGGAGUUCCUGUAAGAU | 824 | TGG |
| Exon45-#5 | 3′ | GGAUGGCAUUGGGCAGCGGC | 825 | TGG |
| Exon45-#6 | 5′ | AUGCCAUCCUGGAGUUCCUG | 826 | TGG |
| Exon45-#7 | 5′ | AAUGCCAUCCUGGAGUUCCU | 827 | GGG |
| Exon45-#8 | 5′ | CUGCCCAAUGCCAUCCUGGA | 828 | CGG |
| Exon45-#9 | 5′ | GUUGCAUUCAAUGUUCUGAC | 829 | TGG |
| Exon45-#10 | 3′ | UUUGGUAUCUUACAGGAACU | 830 | AAG |
| Exon45-#11 | 3′ | ACAGGAACUCCAGGAUGGCA | 831 | AAG |
| Exon45-#12 | 5′ | GAGUUCCUGUAAGAUACCAA | 832 | CAG |
| Exon45-#13 | 3′ | CAGGAUGGCAUUGGGCAGCG | 833 | GAG |
| Exon45-#14 | 5′ | CCCAAUGCCAUCCUGGAGUU | 834 | CAG |
| Exon45-#15 | 5′ | ACAACAGUUUGCCGCUGCCC | 835 | CAG |
| Exon52-#1 | 3′ | GCAGGCGAUUUGACAGAUCU | 836 | AGG |
| Exon52-#2 | 3′ | ACAGGCAACAAUGCAGGAUU | 837 | AAG |
| Exon52-#3 | 5′ | AGUAUCAGGGUUCUUCAGCG | 838 | AAG |
| Exon52-#4 | 3′ | AUACUAAGGGAUAUUUGUUC | 839 | CAG |
| Exon52-#5 | 3′ | AGGGAUAUUUGUUCUUACAG | 840 | TAG |
| Exon52-#6 | 5′ | UAAGAACAAAUAUCCCUUAG | 841 | CAG |
| Exon52-#8 | 5′ | CAUUGUUGCCUGUAAGAACA | 842 | CAG |
| Exon52-#9 | 5′ | UUCCAAAUCCUGCAUUGUUG | 843 | CAG |
| Exon52-#10 | 5′ | UGUUCCAAAUCCUGCAUUGU | 844 | GAG |
| Exon52-#11 | 5′ | GGGACGCCUCUGUUCCAAAU | 845 | CAG |
| Exon52-#12 | 5′ | CCAACUGGGGACGCCUCUGU | 846 | AAG |
| Exon2-#1 | 5′ | ACAGAGGCGUCCCCAGUUGG | 847 | TAG |
| Exon2-#2 | 5′ | UCAUCUAAAAUGCAAAAUAA | 848 | AAG |
| Exon2-#3 | 5′ | UUUCAUCUAAAAUGCAAAAU | 849 | GAG |
| Exon2-#4 | 5′ | CUCUUUCAUCUAAAAUGCAA | 850 | AAG |
| Exon2-#5 | 5′ | UUGAACAUCUUCUCUUUCAU | 851 | AAG |
| Exon51-#1′ | 3′ | CAGAGUAACAGUCUGAGUAG | 852 | GAG |
| Exon51-#2′ | 3′ | CACCAGAGUAACAGUCUGAG | 853 | TAG |
| Exon51-#3′ | 3′ | UAUUUUGGGUUUUUGCAAAA | 854 | AGG |
| Exon51-#4′ | 3′ | AGUAGGAGCUAAAAUAUUUU | 855 | GGG |
| Exon51-#5′ | 3′ | GAGUAGGAGCUAAAAUAUUU | 856 | TGG |
| Exon51-#6′ | 3′ | ACCAGAGUAACAGUCUGAGU | 857 | AGG |
| Exon51-#7′ | 5′ | UCCUACUCAGACUGUUACUC | 858 | TGG |
| Exon51-#8′ | 5′ | UACUCUGGUGACACAACCUG | 859 | TGG |
| Exon51-#9′ | 3′ | GCAGUUUCCUUAGUAACCAC | 860 | AGG |
| Exon51-#10′ | 5′ | GACACAACCUGUGGUUACUA | 861 | AGG |
| Exon51-#11′ | 3′ | UGUCACCAGAGUAACAGUCU | 862 | GAG |
| Exon51-#12′ | 3′ | AGGUUGUGUCACCAGAGUAA | 863 | CAG |
| Exon51-#13′ | 3′ | AACCACAGGUUGUGUCACCA | 864 | GAG |
| Exon51-#14′ | 3′ | GUAACCACAGGUUGUGUCAC | 865 | CAG |
| Exon53-#1′ | 5′ | AUUUAUUUUUCCUUUUAUUC | 866 | TAG |
| Exon53-#2′ | 5′ | UUUCCUUUUAUUCUAGUUGA | 867 | AAG |
| Exon53-#3′ | 3′ | UGAUUCUGAAUUCUUUCAAC | 868 | TAG |
| Exon53-#4′ | 3′ | AAUUCUUUCAACUAGAAUAA | 869 | AAG |
| Exon53-#6′ | 5′ | UUAUUCUAGUUGAAAGAAUU | 870 | CAG |
| Exon53-#7′ | 5′ | UAGUUGAAAGAAUUCAGAAU | 871 | CAG |
| Exon53-#8′ | 5′ | AAUUCAGAAUCAGUGGGAUG | 872 | AAG |
| Exon53-#9′ | 3′ | AUUCUUUCAACUAGAAUAAA | 873 | AGG |
| Exon53-#10′ | 5′ | UUGAAAGAAUUCAGAAUCAG | 874 | TGG |
| Exon53-#11′ | 5′ | UGAAAGAAUUCAGAAUCAGU | 875 | GGG |
| Exon53-#12′ | 3′ | ACUGUUGCCUCCGGUUCUGA | 876 | AGG |
| Exon44-#1′ | 3′ | CAGAUCUGUCAAAUCGCCUG | 877 | CAG |
| Exon44-#2′ | 3′ | AAAACGCCGCCAUUUCUCAA | 878 | CAG |
| Exon44-#3′ | 3′ | AGAUCUGUCAAAUCGCCUGC | 879 | AGG |
| Exon44-#4′ | 3′ | UAUGGAUCAAGAAAAAUAGA | 880 | TGG |
| Exon44-#5′ | 3′ | CGCCUGCAGGUAAAAGCAUA | 881 | TGG |
| Exon44-#6′ | 5′ | AUCCAUAUGCUUUUACCUGC | 882 | AGG |
| Exon44-#8′ | 5′ | UUGACAGAUCUGUUGAGAAA | 883 | TGG |
| Exon44-#9′ | 5′ | ACAGAUCUGUUGAGAAAUGG | 884 | CGG |
| Exon44-#11′ | 5′ | GGCGAUUUGACAGAUCUGUU | 885 | GAG |
| Exon44-#13′ | 5′ | GGCGUUUUCAUUAUGAUAUA | 886 | AAG |
| Exon44-#14′ | 5′ | AUGAUAUAAAGAUAUUUAAU | 887 | CAG |
| Exon44-#15′ | 5′ | GAUAUUUAAUCAGUGGCUAA | 888 | CAG |
| Exon44-#16′ | 5′ | AUUUAAUCAGUGGCUAACAG | 889 | AAG |
| Exon44-#17′ | 3′ | AGAAACUGUUCAGCUUCUGU | 890 | TAG |
| Exon43-#1′ | 5′ | GUUUUAAAAUUUUUAUAUUA | 891 | CAG |
| Exon43-#2′ | 5′ | UUUUAUAUUACAGAAUAUAA | 892 | AAG |
| Exon43-#3′ | 5′ | AUAUUACAGAAUAUAAAAGA | 893 | TAG |
| Exon45-#1′ | 3′ | GUUCCUGUAAGAUACCAAAA | 894 | AGG |
| Exon45-#2′ | 5′ | UUGCCUUUUUGGUAUCUUAC | 895 | AGG |
| Exon45-#3′ | 5′ | UGGUAUCUUACAGGAACUCC | 896 | AGG |
| Exon45-#4′ | 5′ | AUCUUACAGGAACUCCAGGA | 897 | TGG |
| Exon45-#5′ | 3′ | GCCGCUGCCCAAUGCCAUCC | 898 | TGG |
| Exon45-#6′ | 5′ | CAGGAACUCCAGGAUGGCAU | 899 | TGG |
| Exon45-#7 | 5′ | AGGAACUCCAGGAUGGCAUU | 900 | GGG |
| Exon45-#8′ | 5′ | UCCAGGAUGGCAUUGGGCAG | 901 | CGG |
| Exon45-#9′ | 5′ | GUCAGAACAUUGAAUGCAAC | 902 | TGG |
| Exon45-#10′ | 3′ | AGUUCCUGUAAGAUACCAAA | 903 | AAG |
| Exon45-#11′ | 3′ | UGCCAUCCUGGAGUUCCUGU | 904 | AAG |
| Exon45-#12′ | 5′ | UUGGUAUCUUACAGGAACUC | 905 | CAG |
| Exon45-#13′ | 3′ | CGCUGCCCAAUGCCAUCCUG | 906 | GAG |
| Exon45-#14′ | 5′ | AACUCCAGGAUGGCAUUGGG | 907 | CAG |
| Exon45-#15′ | 5′ | GGGCAGCGGCAAACUGUUGU | 908 | CAG |
| Exon52-#1′ | 3′ | AGAUCUGUCAAAUCGCCUGC | 909 | AGG |
| Exon52-#2′ | 3′ | AAUCCUGCAUUGUUGCCUGU | 910 | AAG |
| Exon52-#3′ | 5′ | CGCUGAAGAACCCUGAUACU | 911 | AAG |
| Exon52-#4′ | 3′ | GAACAAAUAUCCCUUAGUAU | 912 | CAG |
| Exon52-#5′ | 3′ | CUGUAAGAACAAAUAUCCCU | 913 | TAG |
| Exon52-#6′ | 5′ | CUAAGGGAUAUUUGUUCUUA | 914 | CAG |
| Exon52-#8′ | 5′ | UGUUCUUACAGGCAACAAUG | 915 | CAG |
| Exon52-#9′ | 5′ | CAACAAUGCAGGAUUUGGAA | 916 | CAG |
| Exon52-#10′ | 5′ | ACAAUGCAGGAUUUGGAACA | 917 | GAG |
| Exon52-#11′ | 5′ | AUUUGGAACAGAGGCGUCCC | 918 | CAG |
| Exon52-#12′ | 5′ | ACAGAGGCGUCCCCAGUUGG | 919 | AAG |
| Exon2-#1′ | 5′ | UAUUUUUUUAUUUUGCAUUU | 920 | TAG |
| Exon2-#2′ | 5′ | UUAUUUUGCAUUUUAGAUGA | 921 | AAG |
| Exon2-#3′ | 5′ | AUUUUGCAUUUUAGAUGAAA | 922 | GAG |
| Exon2-#4′ | 5′ | UUGCAUUUUAGAUGAAAGAG | 923 | AAG |
| Exon2-#5′ | 5′ | AUGAAAGAGAAGAUGUUCAA | 924 | AAG |

TABLE 11
gRNAs targeting dog DMD Exon 51

| | | | SEQ | |
|---|---|---|---|---|
| | | | ID | |
| ID sgRNA | Strand | sgRNAs | NO: | PAM |
| Ex51-SA-2 | 3′ | CACCAGAGTAACAGTCTGAC | 925 | TGG |

TABLE 12
gRNA sequence for targeting dog DMD Exon 51

| | | | SEQ | |
|---|---|---|---|---|
| | | | ID | |
| ID sgRNA | Strand | sgRNAs | NO: | PAM |
| Ex51-SA-2 | 3′ | GUCAGACUGUUACUCUGGUG | 926 | TGG |
| Ex51-SA-2′ | 3′ | CACCAGAGUAACAGUCUGAC | 927 | TGG |

TABLE 13
gRNA sequences for targeting DMD Exon 43 & 45

| sgRNA ID | Sequence (5′-3′) | SEQ ID NO. |
|---|---|---|
| Ex45-gRNA#3 | CGCTGCCCAATGCCATCCTG | 928 |
| Ex45-gRNA#4 | ATCTTACAGGAACTCCAGGA | 929 |
| Ex45-gRNA#5 | AGGAACTCCAGGATGGCATT | 930 |
| Ex45-gRNA#6 | CGCTGCCCAATGCCATCC | 931 |
| Ex43-gRNA#1 | GTTTTAAAATTTTTATATTA | 932 |
| Ex43-gRNA#2 | TTTTATATTACAGAATATAA | 933 |
| Ex43-gRNA#4 | TATGTGTTACCTACCCTTGT | 934 |
| Ex43-gRNA#6 | GTACAAGGACCGACAAGGGT | 935 |
| Ex45-gRNA#3′ | CAGGAUGGCAUUGGGCAGCG | 936 |
| Ex45-gRNA#4′ | UCCUGGAGUUCCUGUAAGAU | 937 |
| Ex45-gRNA#5′ | AAUGCCAUCCUGGAGUUCCU | 938 |
| Ex45-gRNA#6′ | GGAUGGCAUUGGGCAGCG | 939 |
| Ex43-gRNA#1′ | UAAUAUAAAAAUUUUAAAAC | 940 |
| Ex43-gRNA#2′ | UUAUAUUCUGUAAUAUAAAA | 941 |
| Ex43-gRNA#4′ | ACAAGGGUAGGUAACACAUA | 942 |
| Ex43-gRNA#6′ | ACCCUUGUCGGUCCUUGUAC | 943 |
| Ex45-gRNA#3′′ | CGCUGCCCAAUGCCAUCCUG | 944 |
| Ex45-gRNA#4′′ | AUCUUACAGGAACUCCAGGA | 945 |
| Ex45-gRNA#5′′ | AGGAACUCCAGGAUGGCAUU | 946 |
| Ex45-gRNA#6′′ | CGCUGCCCAAUGCCAUCC | 947 |
| Ex43-gRNA#1′′ | GUUUUAAAAUUUUUAUAUUA | 948 |
| Ex43-gRNA#2′′ | UUUUAUAUUACAGAAUAUAA | 949 |
| Ex43-gRNA#4′′ | UAUGUGUUACCUACCCUUGU | 950 |
| Ex43-gRNA#6′′ | GUACAAGGACCGACAAGGGU | 951 |

TABLE 14
Additional exemplary gRNA sequences for targeting DMD

| Targeted gRNA | | | | SEQ | | SEQ ID |
|---|---|---|---|---|---|---|
| Exon | Strand | PAM | DNA sequence* | ID NO. | RNA sequence* | NO. |
| Human-Exon 51 | 1 | tttt | tctttttcttcttttttccttttt | 2025 | ucuuuuucuucuuuuuuccuuuuu | 952 |
| Human-Exon 51 | 1 | tttt | ctttttcttcttttttcctttttG | 2026 | cuuuuucuucuuuuuuccuuuuuG | 953 |
| Human-Exon 51 | 1 | tttc | tttttcttcttttttcctttttGC | 2027 | uuuuucuucuuuuuuccuuuuuGC | 954 |
| Human-Exon 51 | 1 | tttt | tcttcttttttcctttttGCAAAA | 2028 | ucuucuuuuuuccuuuuuGCAAAA | 955 |
| Human-Exon 51 | 1 | tttt | cttcttttttcctttttGCAAAAA | 2029 | cuucuuuuuuccuuuuuGCAAAAA | 956 |
| Human-Exon 51 | 1 | tttc | ttcttttttcctttttGCAAAAAC | 2030 | uucuuuuuuccuuuuuGCAAAAAC | 957 |
| Human-Exon 51 | 1 | tttt | ttcctttttGCAAAAACCCAAAAT | 2031 | uuccuuuuuGCAAAAACCCAAAAU | 958 |
| Human-Exon 51 | 1 | tttt | tcctttttGCAAAAACCCAAAATA | 2032 | uccuuuuuGCAAAAACCCAAAAUA | 959 |
| Human-Exon 51 | 1 | tttt | cctttttGCAAAAACCCAAAATAT | 2033 | ccuuuuuGCAAAAACCCAAAAUAU | 960 |
| Human-Exon 51 | 1 | tttc | ctttttGCAAAAACCCAAAATATT | 2034 | cuuuuuGCAAAAACCCAAAAUAUU | 961 |
| Human-Exon 51 | 1 | tttt | tGCAAAAACCCAAAATATTTTAGC | 2035 | uGCAAAAACCCAAAAUAUUUUAGC | 962 |
| Human-Exon 51 | 1 | tttt | GCAAAAACCCAAAATATTTTAGCT | 2036 | GCAAAAACCCAAAAUAUUUUAGCU | 963 |
| Human-Exon 51 | 1 | tttG | CAAAAACCCAAAATATTTTAGCTC | 2037 | CAAAAACCCAAAAUAUUUUAGCUC | 964 |
| Human-Exon 51 | 1 | TTTT | AGCTCCTACTCAGACTGTTACTCT | 2038 | AGCUCCUACUCAGACUGUUACUCU | 965 |
| Human-Exon 51 | 1 | TTTA | GCTCCTACTCAGACTGTTACTCTG | 2039 | GCUCCUACUCAGACUGUUACUCUG | 966 |
| Human-Exon 51 | −1 | TTTC | CTTAGTAACCACAGGTTGTGTCAC | 2040 | CUUAGUAACCACAGGUUGUGUCAC | 967 |
| Human-Exon 51 | −1 | TTTG | GAGATGGCAGTTTCCTTAGTAACC | 2041 | GAGAUGGCAGUUUCCUUAGUAACC | 968 |
| Human-Exon 51 | −1 | TTTC | TAGTTTGGAGATGGCAGTTTCCTT | 2042 | UAGUUUGGAGAUGGCAGUUUCCUU | 969 |
| Human-Exon 51 | −1 | TTTT | TTCTCATACCTTCTGCTTGATGAT | 2043 | UUCUCAUACCUUCUGCUUGAUGAU | 970 |
| Human-Exon 51 | −1 | TTTA | TCATTTTTTCTCATACCTTCTGCT | 2044 | UCAUUUUUUCUCAUACCUUCUGCU | 971 |
| Human-Exon 51 | −1 | TTTT | ATCATTTTTTCTCATACCTTCTGC | 2045 | AUCAUUUUUUCUCAUACCUUCUGC | 972 |
| Human-Exon 51 | −1 | TTTA | AAGAAAAACTTCTGCCAACTTTTA | 2046 | AAGAAAAACUUCUGCCAACUUUUA | 973 |
| Human-Exon 51 | −1 | TTTT | AAAGAAAAACTTCTGCCAACTTTT | 2047 | AAAGAAAAACUUCUGCCAACUUUU | 974 |
| Human-Exon 51 | 1 | TTTT | TCTTTAAAATGAAGATTTTCCACC | 2048 | UCUUUAAAAUGAAGAUUUUCCACC | 975 |
| Human-Exon 51 | 1 | TTTT | CTTTAAAATGAAGATTTTCCACCA | 2049 | CUUUAAAAUGAAGAUUUUCCACCA | 976 |
| Human-Exon 51 | 1 | TTTC | TTTAAAATGAAGATTTTCCACCAA | 2050 | UUUAAAAUGAAGAUUUUCCACCAA | 977 |
| Human-Exon 51 | 1 | TTTA | AAATGAAGATTTTCCACCAATCAC | 2051 | AAAUGAAGAUUUUCCACCAAUCAC | 978 |
| Human-Exon 51 | 1 | TTTT | CCACCAATCACTTTACTCTCCTAG | 2052 | CCACCAAUCACUUUACUCUCCUAG | 979 |
| Human-Exon 51 | 1 | TTTC | CACCAATCACTTTACTCTCCTAGA | 2053 | CACCAAUCACUUUACUCUCCUAGA | 980 |
| Human-Exon 51 | 1 | TTTA | CTCTCCTAGACCATTTCCCACCAG | 2054 | CUCUCCUAGACCAUUUCCCACCAG | 981 |
| Human-Exon 45 | −1 | tttg | agaaaagattaaacagtgtgctac | 2055 | agaaaagauuaaacagugugcuac | 982 |
| Human-Exon 45 | −1 | TTTa | tttgagaaaagattaaacagtgtg | 2056 | uuugagaaaagauuaaacagugug | 983 |
| Human-Exon 45 | −1 | TTTT | atttgagaaaagattaaacagtgt | 2057 | auuugagaaaagauuaaacagugu | 984 |
| Human-Exon 45 | −1 | TTTT | Tatttgagaaaagattaaacagtg | 2058 | Uauuugagaaaagauuaaacagug | 985 |
| Human-Exon 45 | 1 | ttta | atottttctcaaatAAAAAGACAT | 2059 | aucuuuucucaaauAAAAAGACAU | 986 |
| Human-Exon 45 | 1 | tttt | ctcaaatAAAAAGACATGGGGCTT | 2060 | cucaaauAAAAAGACAUGGGGCUU | 987 |
| Human-Exon 45 | 1 | tttc | tcaaatAAAAAGACATGGGGCTTC | 2061 | ucaaauAAAAAGACAUGGGGCUUC | 988 |
| Human-Exon 45 | 1 | TTTT | TGTTTTGCCTTTTTGGTATCTTAC | 2062 | UGUUUUGCCUUUUUGGUAUCUUAC | 989 |
| Human-Exon 45 | 1 | TTTT | GTTTTGCCTTTTTGGTATCTTACA | 2063 | GUUUUGCCUUUUUGGUAUCUUACA | 990 |
| Human-Exon 45 | 1 | TTTG | TTTTGCCTTTTTGGTATCTTACAG | 2064 | UUUUGCCUUUUUGGUAUCUUACAG | 991 |
| Human-Exon 45 | 1 | TTTT | GCCTTTTTGGTATCTTACAGGAAC | 2065 | GCCUUUUUGGUAUCUUACAGGAAC | 992 |
| Human-Exon 45 | 1 | TTTG | CCTTTTTGGTATCTTACAGGAACT | 2066 | CCUUUUUGGUAUCUUACAGGAACU | 993 |
| Human-Exon 45 | 1 | TTTT | TGGTATCTTACAGGAACTCCAGGA | 2067 | UGGUAUCUUACAGGAACUCCAGGA | 994 |
| Human-Exon 45 | 1 | TTTT | GGTATCTTACAGGAACTCCAGGAT | 2068 | GGUAUCUUACAGGAACUCCAGGAU | 995 |
| Human-Exon 45 | −1 | TTTG | AGGATTGCTGAATTATTTCTTCCC | 2069 | AGGAUUGCUGAAUUAUUUCUUCCC | 996 |
| Human-Exon 45 | −1 | TTTT | GAGGATTGCTGAATTATTTCTTCC | 2070 | GAGGAUUGCUGAAUUAUUUCUUCC | 997 |
| Human-Exon 45 | −1 | TTTT | TGAGGATTGCTGAATTATTTCTTC | 2071 | UGAGGAUUGCUGAAUUAUUUCUUC | 998 |
| Human-Exon 45 | −1 | TTTC | CTGTAGAATACTGGCATCTGTTTT | 2072 | CUGUAGAAUACUGGCAUCUGUUUU | 999 |
| Human-Exon 45 | −1 | TTTT | CCTGTAGAATACTGGCATCTGTTT | 2073 | CCUGUAGAAUACUGGCAUCUGUUU | 1000 |
| Human-Exon 45 | −1 | TTTT | TCCTGTAGAATACTGGCATCTGTT | 2074 | UCCUGUAGAAUACUGGCAUCUGUU | 1001 |
| Human-Exon 45 | −1 | TTTG | CAGACCTCCTGCCACCGCAGATTC | 2075 | CAGACCUCCUGCCACCGCAGAUUC | 1002 |
| Human-Exon 45 | −1 | TTTC | TGTCTGACAGCTGTTTGCAGACCT | 2076 | UGUCUGACAGCUGUUUGCAGACCU | 1003 |
| Human-Exon 45 | −1 | TTTT | CTGTCTGACAGCTGTTTGCAGACC | 2077 | CUGUCUGACAGCUGUUUGCAGACC | 1004 |
| Human-Exon 45 | −1 | TTTT | TCTGTCTGACAGCTGTTTGCAGAC | 2078 | UCUGUCUGACAGCUGUUUGCAGAC | 1005 |
| Human-Exon 45 | −1 | TTTT | TTCTGTCTGACAGCTGTTTGCAGA | 2079 | UUCUGUCUGACAGCUGUUUGCAGA | 1006 |
| Human-Exon 45 | −1 | TTTC | ATTCCTATTAGATCTGTCGCCCTA | 2080 | AUUCCUAUUAGAUCUGUCGCCCUA | 1007 |
| Human-Exon 45 | −1 | TTTT | CATTCCTATTAGATCTGTCGCCCT | 2081 | CAUUCCUAUUAGAUCUGUCGCCCU | 1008 |
| Human-Exon 45 | 1 | TTTT | AGCAGACTTTTTAAGCTTTCTTTA | 2082 | AGCAGACUUUUUAAGCUUUCUUUA | 1009 |
| Human-Exon 45 | 1 | TTTA | GCAGACTTTTTAAGCTTTCTTTAG | 2083 | GCAGACUUUUUAAGCUUUCUUUAG | 1010 |
| Human-Exon 45 | 1 | TTTT | TAAGCTTTCTTTAGAAGAATATTT | 2084 | UAAGCUUUCUUUAGAAGAAUAUUU | 1011 |
| Human-Exon 45 | 1 | TTTT | AAGCTTTCTTTAGAAGAATATTTC | 2085 | AAGCUUUCUUUAGAAGAAUAUUUC | 1012 |
| Human-Exon 45 | 1 | TTTA | AGCTTTCTTTAGAAGAATATTTCA | 2086 | AGCUUUCUUUAGAAGAAUAUUUCA | 1013 |
| Human-Exon 45 | 1 | TTTC | TTTAGAAGAATATTTCATGAGAGA | 2087 | UUUAGAAGAAUAUUUCAUGAGAGA | 1014 |
| Human-Exon 45 | 1 | TTTA | GAAGAATATTTCATGAGAGATTAT | 2088 | GAAGAAUAUUUCAUGAGAGAUUAU | 1015 |
| Human-Exon 44 | 1 | TTTG | TCAGTATAACCAAAAAATATACGC | 2089 | UCAGUAUAACCAAAAAAUAUACGC | 1016 |
| Human-Exon 44 | 1 | tttt | acataatccatctatttttcttga | 2090 | acauaauccaucuauuuuucuuga | 1017 |
| Human-Exon 44 | 1 | ttta | cataatccatctatttttcttgat | 2091 | cauaauccaucuauuuuucuugau | 1018 |
| Human-Exon 44 | 1 | tttt | tcttgatccatatgcttttACCTG | 2092 | ucuugauccauaugcuuuuACCUG | 1019 |
| Human-Exon 44 | 1 | tttt | cttgatccatatgcttttACCTGC | 2093 | cuugauccauaugcuuuuACCUGC | 1020 |
| Human-Exon 44 | 1 | tttc | ttgatccatatgcttttACCTGCA | 2094 | uugauccauaugcuuuuACCUGCA | 1021 |
| Human-Exon 44 | −1 | TTTC | TCAACAGATCTGTCAAATCGCCTG | 2095 | UCAACAGAUCUGUCAAAUCGCCUG | 1022 |
| Human-Exon 44 | 1 | tttt | ACCTGCAGGCGATTTGACAGATCT | 2096 | ACCUGCAGGCGAUUUGACAGAUCU | 1023 |
| Human-Exon 44 | 1 | tttA | CCTGCAGGCGATTTGACAGATCTG | 2097 | CCUGCAGGCGAUUUGACAGAUCUG | 1024 |
| Human-Exon 44 | 1 | TTTG | ACAGATCTGTTGAGAAATGGCGGC | 2098 | ACAGAUCUGUUGAGAAAUGGCGGC | 1025 |
| Human-Exon 44 | −1 | TTTA | TATCATAATGAAAACGCCGCCATT | 2099 | UAUCAUAAUGAAAACGCCGCCAUU | 1026 |
| Human-Exon 44 | 1 | TTTT | CATTATGATATAAAGATATTTAAT | 2100 | CAUUAUGAUAUAAAGAUAUUUAAU | 1027 |
| Human-Exon 44 | −1 | TTTG | TATTTAGCATGTTCCCAATTCTCA | 2101 | UAUUUAGCAUGUUCCCAAUUCUCA | 1028 |
| Human-Exon 44 | −1 | TTTC | GAAAAAACAAATCAAAGACTTACC | 2102 | GAAAAAACAAAUCAAAGACUUACC | 1029 |
| Human-Exon 44 | 1 | TTTG | ATTTGTTTTTTCGAAATTGTATTT | 2103 | AUUUGUUUUUUCGAAAUUGUAUUU | 1030 |
| Human-Exon 44 | 1 | TTTG | TTTTTTCGAAATTGTATTTATCTT | 2104 | UUUUUUCGAAAUUGUAUUUAUCUU | 1031 |
| Human-Exon 44 | 1 | TTTT | TTCGAAATTGTATTTATCTTCAGC | 2105 | UUCGAAAUUGUAUUUAUCUUCAGC | 1032 |
| Human-Exon 44 | 1 | TTTT | TCGAAATTGTATTTATCTTCAGCA | 2106 | UCGAAAUUGUAUUUAUCUUCAGCA | 1033 |
| Human-Exon 44 | 1 | TTTT | CGAAATTGTATTTATCTTCAGCAC | 2107 | CGAAAUUGUAUUUAUCUUCAGCAC | 1034 |
| Human-Exon 44 | 1 | TTTC | GAAATTGTATTTATCTTCAGCACA | 2108 | GAAAUUGUAUUUAUCUUCAGCACA | 1035 |
| Human-Exon 44 | −1 | TTTA | AGAAGTTAAAGAGTCCAGATGTGC | 2109 | AGAAGUUAAAGAGUCCAGAUGUGC | 1036 |
| Human-Exon 44 | 1 | TTTA | TCTTCAGCACATCTGGACTCTTTA | 2110 | UCUUCAGCACAUCUGGACUCUUUA | 1037 |
| Human-Exon 44 | −1 | TTTC | CATCACCCTTCAGAACCTGATCTT | 2111 | CAUCACCCUUCAGAACCUGAUCUU | 1038 |
| Human-Exon 44 | 1 | TTTA | ACTTCTTAAAGATCAGGTTCTGAA | 2112 | ACUUCUUAAAGAUCAGGUUCUGAA | 1039 |
| Human-Exon 44 | 1 | TTTT | GACTGTTGTTGTCATCATTATATT | 2113 | GACUGUUGUUGUCAUCAUUAUAUU | 1040 |
| Human-Exon 44 | 1 | TTTG | ACTGTTGTTGTCATCATTATATTA | 2114 | ACUGUUGUUGUCAUCAUUAUAUUA | 1041 |
| Human-Exon 53 | −1 | TTTC | AACTAGAATAAAAGGAAAAATAAA | 2115 | AACUAGAAUAAAAGGAAAAAUAAA | 1042 |
| Human-Exon 53 | 1 | TTTA | CTACTATATATTTATTTTTCCTTT | 2116 | CUACUAUAUAUUUAUUUUUCCUUU | 1043 |
| Human-Exon 53 | 1 | TTTA | TTTTTCCTTTTATTCTAGTTGAAA | 2117 | UUUUUCCUUUUAUUCUAGUUGAAA | 1044 |
| Human-Exon 53 | 1 | TTTT | TCCTTTTATTCTAGTTGAAAGAAT | 2118 | UCCUUUUAUUCUAGUUGAAAGAAU | 1045 |
| Human-Exon 53 | 1 | TTTT | CCTTTTATTCTAGTTGAAAGAATT | 2119 | CCUUUUAUUCUAGUUGAAAGAAUU | 1046 |
| Human-Exon 53 | 1 | TTTC | CTTTTATTCTAGTTGAAAGAATTC | 2120 | CUUUUAUUCUAGUUGAAAGAAUUC | 1047 |
| Human-Exon 53 | 1 | TTTT | ATTCTAGTTGAAAGAATTCAGAAT | 2121 | AUUCUAGUUGAAAGAAUUCAGAAU | 1048 |
| Human-Exon 53 | 1 | TTTA | TTCTAGTTGAAAGAATTCAGAATC | 2122 | UUCUAGUUGAAAGAAUUCAGAAUC | 1049 |
| Human-Exon 53 | −1 | TTTC | ATTCAACTGTTGCCTCCGGTTCTG | 2123 | AUUCAACUGUUGCCUCCGGUUCUG | 1050 |
| Human-Exon 53 | −1 | TTTA | ACATTTCATTCAACTGTTGCCTCC | 2124 | ACAUUUCAUUCAACUGUUGCCUCC | 1051 |
| Human-Exon 53 | −1 | TTTT | CTTTTGGATTGCATCTACTGTATA | 2125 | CUUUUGGAUUGCAUCUACUGUAUA | 1052 |
| Human-Exon 53 | −1 | TTTC | TGTGATTTTCTTTTGGATTGCATC | 2126 | UGUGAUUUUCUUUUGGAUUGCAUC | 1053 |
| Human-Exon 53 | −1 | TTTG | ATACTAACCTTGGTTTCTGTGATT | 2127 | AUACUAACCUUGGUUUCUGUGAUU | 1054 |
| Human-Exon 53 | −1 | TTTA | AAAAGGTATCTTTGATACTAACCT | 2128 | AAAAGGUAUCUUUGAUACUAACCU | 1055 |
| Human-Exon 53 | −1 | TTTT | AAAAAGGTATCTTTGATACTAACC | 2129 | AAAAAGGUAUCUUUGAUACUAACC | 1056 |
| Human-Exon 53 | −1 | TTTA | TTTTAAAAAGGTATCTTTGATACT | 2130 | UUUUAAAAAGGUAUCUUUGAUACU | 1057 |
| Human-Exon 53 | −1 | TTTT | ATTTTAAAAAGGTATCTTTGATAC | 2131 | AUUUUAAAAAGGUAUCUUUGAUAC | 1058 |
| Human-Exon 46 | −1 | TTTG | TTAATGCAAACTGGGACACAAACA | 2132 | UUAAUGCAAACUGGGACACAAACA | 1059 |
| Human-Exon 46 | 1 | TTTT | TAAATTGCCATGTTTGTGTCCCAG | 2133 | UAAAUUGCCAUGUUUGUGUCCCAG | 1060 |
| Human-Exon 46 | 1 | TTTT | AAATTGCCATGTTTGTGTCCCAGT | 2134 | AAAUUGCCAUGUUUGUGUCCCAGU | 1061 |
| Human-Exon 46 | 1 | TTTA | AATTGCCATGTTTGTGTCCCAGTT | 2135 | AAUUGCCAUGUUUGUGUCCCAGUU | 1062 |
| Human-Exon 46 | 1 | TTTG | TGTCCCAGTTTGCATTAACAAATA | 2136 | UGUCCCAGUUUGCAUUAACAAAUA | 1063 |
| Human-Exon 46 | −1 | tttC | CAACATAGTTCTCAAACTATTTGT | 2137 | CAACAUAGUUCUCAAACUAUUUGU | 1064 |
| Human-Exon 46 | −1 | tttt | CCAACATAGTTCTCAAACTATTTG | 2138 | CCAACAUAGUUCUCAAACUAUUUG | 1065 |
| Human-Exon 46 | −1 | tttt | tCCAACATAGTTCTCAAACTATTT | 2139 | uCCAACAUAGUUCUCAAACUAUUU | 1066 |
| Human-Exon 46 | −1 | tttt | tttCCAACATAGTTCTCAAACTAT | 2140 | uuuCCAACAUAGUUCUCAAACUAU | 1067 |
| Human-Exon 46 | −1 | tttt | ttttCCAACATAGTTCTCAAACTA | 2141 | uuuuCCAACAUAGUUCUCAAACUA | 1068 |
| Human-Exon 46 | −1 | tttt | tttttCCAACATAGTTCTCAAACT | 2142 | uuuuuCCAACAUAGUUCUCAAACU | 1069 |
| Human-Exon 46 | 1 | TTTG | CATTAACAAATAGTTTGAGAACTA | 2143 | CAUUAACAAAUAGUUUGAGAACUA | 1070 |
| Human-Exon 46 | 1 | TTTG | AGAACTATGTTGGaaaaaaaaaTA | 2144 | AGAACUAUGUUGGaaaaaaaaaUA | 1071 |
| Human-Exon 46 | −1 | TTTT | GTTCTTCTAGCCTGGAGAAAGAAG | 2145 | GUUCUUCUAGCCUGGAGAAAGAAG | 1072 |
| Human-Exon 46 | 1 | TTTT | ATTCTTCTTTCTCCAGGCTAGAAG | 2146 | AUUCUUCUUUCUCCAGGCUAGAAG | 1073 |
| Human-Exon 46 | 1 | TTTA | TTCTTCTTTCTCCAGGCTAGAAGA | 2147 | UUCUUCUUUCUCCAGGCUAGAAGA | 1074 |
| Human-Exon 46 | 1 | TTTC | TCCAGGCTAGAAGAACAAAAGAAT | 2148 | UCCAGGCUAGAAGAACAAAAGAAU | 1075 |
| Human-Exon 46 | −1 | TTTG | AAATTCTGACAAGATATTCTTTTG | 2149 | AAAUUCUGACAAGAUAUUCUUUUG | 1076 |
| Human-Exon 46 | −1 | TTTT | CTTTTAGTTGCTGCTCTTTTCCAG | 2150 | CUUUUAGUUGCUGCUCUUUUCCAG | 1077 |
| Human-Exon 46 | −1 | TTTG | AGAAAATAAAATTACCTTGACTTG | 2151 | AGAAAAUAAAAUUACCUUGACUUG | 1078 |
| Human-Exon 46 | −1 | TTTA | TGCAAGCAGGCCCTGGGGGATTTG | 2152 | UGCAAGCAGGCCCUGGGGGAUUUG | 1079 |
| Human-Exon 46 | 1 | TTTT | ATTTTCTCAAATCCCCCAGGGCCT | 2153 | AUUUUCUCAAAUCCCCCAGGGCCU | 1080 |
| Human-Exon 46 | 1 | TTTA | TTTTCTCAAATCCCCCAGGGCCTG | 2154 | UUUUCUCAAAUCCCCCAGGGCCUG | 1081 |
| Human-Exon 46 | 1 | TTTT | CTCAAATCCCCCAGGGCCTGCTTG | 2155 | CUCAAAUCCCCCAGGGCCUGCUUG | 1082 |
| Human-Exon 46 | 1 | TTTC | TCAAATCCCCCAGGGCCTGCTTGC | 2156 | UCAAAUCCCCCAGGGCCUGCUUGC | 1083 |
| Human-Exon 46 | 1 | TTTT | TTAATTCAATCATTGGTTTTCTGC | 2157 | UUAAUUCAAUCAUUGGUUUUCUGC | 1084 |
| Human-Exon 46 | 1 | TTTT | TAATTCAATCATTGGTTTTCTGCC | 2158 | UAAUUCAAUCAUUGGUUUUCUGCC | 1085 |
| Human-Exon 46 | 1 | TTTT | AATTCAATCATTGGTTTTCTGCCC | 2159 | AAUUCAAUCAUUGGUUUUCUGCCC | 1086 |
| Human-Exon 46 | 1 | TTTA | ATTCAATCATTGGTTTTCTGCCCA | 2160 | AUUCAAUCAUUGGUUUUCUGCCCA | 1087 |
| Human-Exon 46 | −1 | TTTA | GCAAGGAACTATGAATAACCTAAT | 2161 | GCAAGGAACUAUGAAUAACCUAAU | 1088 |
| Human-Exon 46 | 1 | TTTT | CTGCCCATTAGGTTATTCATAGTT | 2162 | CUGCCCAUUAGGUUAUUCAUAGUU | 1089 |
| Human-Exon 46 | 1 | TTTC | TGCCCATTAGGTTATTCATAGTTC | 2163 | UGCCCAUUAGGUUAUUCAUAGUUC | 1090 |
| Human-Exon 52 | −1 | TTTA | TAGAAAACAATTTAACAGGAAATA | 2164 | UAGAAAACAAUUUAACAGGAAAUA | 1091 |
| Human-Exon 52 | 1 | TTTC | CTGTTAAATTGTTTTCTATAAACC | 2165 | CUGUUAAAUUGUUUUCUAUAAACC | 1092 |
| Human-Exon 52 | −1 | TTTA | GAAATAAAAAAGATGTTACTGTAT | 2166 | GAAAUAAAAAAGAUGUUACUGUAU | 1093 |
| Human-Exon 52 | −1 | TTTT | AGAAATAAAAAAGATGTTACTGTA | 2167 | AGAAAUAAAAAAGAUGUUACUGUA | 1094 |
| Human-Exon 52 | 1 | TTTT | CTATAAACCCTTATACAGTAACAT | 2168 | CUAUAAACCCUUAUACAGUAACAU | 1095 |
| Human-Exon 52 | 1 | TTTC | TATAAACCCTTATACAGTAACATC | 2169 | UAUAAACCCUUAUACAGUAACAUC | 1096 |
| Human-Exon 52 | 1 | TTTT | TTATTTCTAAAAGTGTTTTGGCTG | 2170 | UUAUUUCUAAAAGUGUUUUGGCUG | 1097 |
| Human-Exon 52 | 1 | TTTT | TATTTCTAAAAGTGTTTTGGCTGG | 2171 | UAUUUCUAAAAGUGUUUUGGCUGG | 1098 |
| Human-Exon 52 | 1 | TTTT | ATTTCTAAAAGTGTTTTGGCTGGT | 2172 | AUUUCUAAAAGUGUUUUGGCUGGU | 1099 |
| Human-Exon 52 | 1 | TTTA | TTTCTAAAAGTGTTTTGGCTGGTC | 2173 | UUUCUAAAAGUGUUUUGGCUGGUC | 1100 |
| Human-Exon 52 | 1 | TTTC | TAAAAGTGTTTTGGCTGGTCTCAC | 2174 | UAAAAGUGUUUUGGCUGGUCUCAC | 1101 |
| Human-Exon 52 | −1 | TTTA | CATAATACAAAGTAAAGTACAATT | 2175 | CAUAAUACAAAGUAAAGUACAAUU | 1102 |
| Human-Exon 52 | −1 | TTTT | ACATAATACAAAGTAAAGTACAAT | 2176 | ACAUAAUACAAAGUAAAGUACAAU | 1103 |
| Human-Exon 52 | 1 | TTTT | GGCTGGTCTCACAATTGTACTTTA | 2177 | GGCUGGUCUCACAAUUGUACUUUA | 1104 |
| Human-Exon 52 | 1 | TTTG | GCTGGTCTCACAATTGTACTTTAC | 2178 | GCUGGUCUCACAAUUGUACUUUAC | 1105 |
| Human-Exon 52 | 1 | TTTA | CTTTGTATTATGTAAAAGGAATAC | 2179 | CUUUGUAUUAUGUAAAAGGAAUAC | 1106 |
| Human-Exon 52 | 1 | TTTG | TATTATGTAAAAGGAATACACAAC | 2180 | UAUUAUGUAAAAGGAAUACACAAC | 1107 |
| Human-Exon 52 | 1 | TTTG | TTCTTACAGGCAACAATGCAGGAT | 2181 | UUCUUACAGGCAACAAUGCAGGAU | 1108 |
| Human-Exon 52 | 1 | TTTG | GAACAGAGGCGTCCCCAGTTGGAA | 2182 | GAACAGAGGCGUCCCCAGUUGGAA | 1109 |
| Human-Exon 52 | −1 | TTTG | GGCAGCGGTAATGAGTTCTTCCAA | 2183 | GGCAGCGGUAAUGAGUUCUUCCAA | 1110 |
| Human-Exon 52 | −1 | TTTT | TCAAATTTTGGGCAGCGGTAATGA | 2184 | UCAAAUUUUGGGCAGCGGUAAUGA | 1111 |
| Human-Exon 52 | 1 | TTTG | AAAAACAAGACCAGCAATCAAGAG | 2185 | AAAAACAAGACCAGCAAUCAAGAG | 1112 |
| Human-Exon 52 | −1 | TTTG | TGTGTCCCATGCTTGTTAAAAAAC | 2186 | UGUGUCCCAUGCUUGUUAAAAAAC | 1113 |
| Human-Exon 52 | 1 | TTTT | TTAACAAGCATGGGACACACAAAG | 2187 | UUAACAAGCAUGGGACACACAAAG | 1114 |
| Human-Exon 52 | 1 | TTTT | TAACAAGCATGGGACACACAAAGC | 2188 | UAACAAGCAUGGGACACACAAAGC | 1115 |
| Human-Exon 52 | 1 | TTTT | AACAAGCATGGGACACACAAAGCA | 2189 | AACAAGCAUGGGACACACAAAGCA | 1116 |
| Human-Exon 52 | 1 | TTTA | ACAAGCATGGGACACACAAAGCAA | 2190 | ACAAGCAUGGGACACACAAAGCAA | 1117 |
| Human-Exon 52 | −1 | TTTA | TTGAAACTTGTCATGCATCTTGCT | 2191 | UUGAAACUUGUCAUGCAUCUUGCU | 1118 |
| Human-Exon 52 | −1 | TTTT | ATTGAAACTTGTCATGCATCTTGC | 2192 | AUUGAAACUUGUCAUGCAUCUUGC | 1119 |
| Human-Exon 52 | −1 | TTTT | TATTGAAACTTGTCATGCATCTTG | 2193 | UAUUGAAACUUGUCAUGCAUCUUG | 1120 |
| Human-Exon 52 | 1 | TTTC | AATAAAAACTTAAGTTCATATATC | 2194 | AAUAAAAACUUAAGUUCAUAUAUC | 1121 |
| Human-Exon 50 | −1 | TTTG | GTGAATATATTATTGGATTTCTAT | 2195 | GUGAAUAUAUUAUUGGAUUUCUAU | 1122 |
| Human-Exon 50 | −1 | TTTG | AAGATAATTCATGAACATCTTAAT | 2196 | AAGAUAAUUCAUGAACAUCUUAAU | 1123 |
| Human-Exon 50 | −1 | TTTA | ACAGAAAAGCATACACATTACTTA | 2197 | ACAGAAAAGCAUACACAUUACUUA | 1124 |
| Human-Exon 50 | 1 | TTTT | CTGTTAAAGAGGAAGTTAGAAGAT | 2198 | CUGUUAAAGAGGAAGUUAGAAGAU | 1125 |
| Human-Exon 50 | 1 | TTTC | TGTTAAAGAGGAAGTTAGAAGATC | 2199 | UGUUAAAGAGGAAGUUAGAAGAUC | 1126 |
| Human-Exon 50 | −1 | TTTA | CCGCCTTCCACTCAGAGCTCAGAT | 2200 | CCGCCUUCCACUCAGAGCUCAGAU | 1127 |
| Human-Exon 50 | −1 | TTTG | CCCTCAGCTCTTGAAGTAAACGGT | 2201 | CCCUCAGCUCUUGAAGUAAACGGU | 1128 |
| Human-Exon 50 | 1 | TTTA | CTTCAAGAGCTGAGGGCAAAGCAG | 2202 | CUUCAAGAGCUGAGGGCAAAGCAG | 1129 |
| Human-Exon 50 | −1 | TTTG | AACAAATAGCTAGAGCCAAAGAGA | 2203 | AACAAAUAGCUAGAGCCAAAGAGA | 1130 |
| Human-Exon 50 | −1 | TTTT | GAACAAATAGCTAGAGCCAAAGAG | 2204 | GAACAAAUAGCUAGAGCCAAAGAG | 1131 |
| Human-Exon 50 | 1 | TTTG | GCTCTAGCTATTTGTTCAAAAGTG | 2205 | GCUCUAGCUAUUUGUUCAAAAGUG | 1132 |
| Human-Exon 50 | 1 | TTTG | TTCAAAAGTGCAACTATGAAGTGA | 2206 | UUCAAAAGUGCAACUAUGAAGUGA | 1133 |
| Human-Exon 50 | −1 | TTTC | TCTCTCACCCAGTCATCACTTCAT | 2207 | UCUCUCACCCAGUCAUCACUUCAU | 1134 |
| Human-Exon 50 | −1 | TTTT | CTCTCTCACCCAGTCATCACTTCA | 2208 | CUCUCUCACCCAGUCAUCACUUCA | 1135 |
| Human-Exon 43 | 1 | TTTG | tatatatatatatatTTTTCTCTT | 2209 | uauauauauauauauUUUUCUCUU | 1136 |
| Human-Exon 43 | 1 | tTTT | TCTCTTTCTATAGACAGCTAATTC | 2210 | UCUCUUUCUAUAGACAGCUAAUUC | 1137 |
| Human-Exon 43 | 1 | TTTT | CTCTTTCTATAGACAGCTAATTCA | 2211 | CUCUUUCUAUAGACAGCUAAUUCA | 1138 |
| Human-Exon 43 | −1 | TTTA | AAACAGTAAAAAAATGAATTAGCT | 2212 | AAACAGUAAAAAAAUGAAUUAGCU | 1139 |
| Human-Exon 43 | 1 | TTTC | TCTTTCTATAGACAGCTAATTCAT | 2213 | UCUUUCUAUAGACAGCUAAUUCAU | 1140 |
| Human-Exon 43 | −1 | TTTT | AAAACAGTAAAAAAATGAATTAGC | 2214 | AAAACAGUAAAAAAAUGAAUUAGC | 1141 |
| Human-Exon 43 | 1 | TTTC | TATAGACAGCTAATTCATTTTTTT | 2215 | UAUAGACAGCUAAUUCAUUUUUUU | 1142 |
| Human-Exon 43 | −1 | TTTA | TATTCTGTAATATAAAAATTTTAA | 2216 | UAUUCUGUAAUAUAAAAAUUUUAA | 1143 |
| Human-Exon 43 | −1 | TTTT | ATATTCTGTAATATAAAAATTTTA | 2217 | AUAUUCUGUAAUAUAAAAAUUUUA | 1144 |
| Human-Exon 43 | 1 | TTTT | TTTACTGTTTTAAAATTTTTATAT | 2218 | UUUACUGUUUUAAAAUUUUUAUAU | 1145 |
| Human-Exon 43 | 1 | TTTT | TTACTGTTTTAAAATTTTTATATT | 2219 | UUACUGUUUUAAAAUUUUUAUAUU | 1146 |
| Human-Exon 43 | 1 | TTTT | TACTGTTTTAAAATTTTTATATTA | 2220 | UACUGUUUUAAAAUUUUUAUAUUA | 1147 |
| Human-Exon 43 | 1 | TTTT | ACTGTTTTAAAATTTTTATATTAC | 2221 | ACUGUUUUAAAAUUUUUAUAUUAC | 1148 |
| Human-Exon 43 | 1 | TTTA | CTGTTTTAAAATTTTTATATTACA | 2222 | CUGUUUUAAAAUUUUUAUAUUACA | 1149 |
| Human-Exon 43 | 1 | TTTT | AAAATTTTTATATTACAGAATATA | 2223 | AAAAUUUUUAUAUUACAGAAUAUA | 1150 |
| Human-Exon 43 | 1 | TTTA | AAATTTTTATATTACAGAATATAA | 2224 | AAAUUUUUAUAUUACAGAAUAUAA | 1151 |
| Human-Exon 43 | −1 | TTTG | TTGTAGACTATCTTTTATATTCTG | 2225 | UUGUAGACUAUCUUUUAUAUUCUG | 1152 |
| Human-Exon 43 | 1 | TTTT | TATATTACAGAATATAAAAGATAG | 2226 | UAUAUUACAGAAUAUAAAAGAUAG | 1153 |
| Human-Exon 43 | 1 | TTTT | ATATTACAGAATATAAAAGATAGT | 2227 | AUAUUACAGAAUAUAAAAGAUAGU | 1154 |
| Human-Exon 43 | 1 | TTTA | TATTACAGAATATAAAAGATAGTC | 2228 | UAUUACAGAAUAUAAAAGAUAGUC | 1155 |
| Human-Exon 43 | −1 | TTTG | CAATGCTGCTGTCTTCTTGCTATG | 2229 | CAAUGCUGCUGUCUUCUUGCUAUG | 1156 |
| Human-Exon 43 | 1 | TTTC | CAATGGGAAAAAGTTAACAAAATG | 2230 | CAAUGGGAAAAAGUUAACAAAAUG | 1157 |
| Human-Exon 43 | −1 | TTTC | TGCAAGTATCAAGAAAAATATATG | 2231 | UGCAAGUAUCAAGAAAAAUAUAUG | 1158 |
| Human-Exon 43 | 1 | TTTT | TCTTGATACTTGCAGAAATGATTT | 2232 | UCUUGAUACUUGCAGAAAUGAUUU | 1159 |
| Human-Exon 43 | 1 | TTTT | CTTGATACTTGCAGAAATGATTTG | 2233 | CUUGAUACUUGCAGAAAUGAUUUG | 1160 |
| Human-Exon 43 | 1 | TTTC | TTGATACTTGCAGAAATGATTTGT | 2234 | UUGAUACUUGCAGAAAUGAUUUGU | 1161 |
| Human-Exon 43 | 1 | TTTG | TTTTCAGGGAACTGTAGAATTTAT | 2235 | UUUUCAGGGAACUGUAGAAUUUAU | 1162 |
| Human-Exon 43 | −1 | TTTC | CATGGAGGGTACTGAAATAAATTC | 2236 | CAUGGAGGGUACUGAAAUAAAUUC | 1163 |
| Human-Exon 43 | −1 | TTTT | CCATGGAGGGTACTGAAATAAATT | 2237 | CCAUGGAGGGUACUGAAAUAAAUU | 1164 |
| Human-Exon 43 | 1 | TTTT | CAGGGAACTGTAGAATTTATTTCA | 2238 | CAGGGAACUGUAGAAUUUAUUUCA | 1165 |
| Human-Exon 43 | −1 | TTTT | TCCATGGAGGGTACTGAAATAAAT | 2239 | UCCAUGGAGGGUACUGAAAUAAAU | 1166 |
| Human-Exon 43 | 1 | TTTC | AGGGAACTGTAGAATTTATTTCAG | 2240 | AGGGAACUGUAGAAUUUAUUUCAG | 1167 |
| Human-Exon 43 | −1 | TTTT | TTCCATGGAGGGTACTGAAATAAA | 2241 | UUCCAUGGAGGGUACUGAAAUAAA | 1168 |
| Human-Exon 43 | −1 | TTTC | CCTGTCTTTTTTCCATGGAGGGTA | 2242 | CCUGUCUUUUUUCCAUGGAGGGUA | 1169 |
| Human-Exon 43 | −1 | TTTT | CCCTGTCTTTTTTCCATGGAGGGT | 2243 | CCCUGUCUUUUUUCCAUGGAGGGU | 1170 |
| Human-Exon 43 | −1 | TTTT | TCCCTGTCTTTTTTCCATGGAGGG | 2244 | UCCCUGUCUUUUUUCCAUGGAGGG | 1171 |
| Human-Exon 43 | 1 | TTTA | TTTCAGTACCCTCCATGGAAAAAA | 2245 | UUUCAGUACCCUCCAUGGAAAAAA | 1172 |
| Human-Exon 43 | 1 | TTTC | AGTACCCTCCATGGAAAAAAGACA | 2246 | AGUACCCUCCAUGGAAAAAAGACA | 1173 |
| Human-Exon 6 | 1 | TTTA | AGTTTGCATGGTTCTTGCTCAAGG | 2247 | AGUUUGCAUGGUUCUUGCUCAAGG | 1174 |
| Human-Exon 6 | −1 | TTTC | ATAAGAAAATGCATTCCTTGAGCA | 2248 | AUAAGAAAAUGCAUUCCUUGAGCA | 1175 |
| Human-Exon 6 | −1 | TTTT | CATAAGAAAATGCATTCCTTGAGC | 2249 | CAUAAGAAAAUGCAUUCCUUGAGC | 1176 |
| Human-Exon 6 | 1 | TTTG | CATGGTTCTTGCTCAAGGAATGCA | 2250 | CAUGGUUCUUGCUCAAGGAAUGCA | 1177 |
| Human-Exon 6 | −1 | TTTG | ACCTACATGTGGAAATAAATTTTC | 2251 | ACCUACAUGUGGAAAUAAAUUUUC | 1178 |
| Human-Exon 6 | −1 | TTTT | GACCTACATGTGGAAATAAATTTT | 2252 | GACCUACAUGUGGAAAUAAAUUUU | 1179 |
| Human-Exon 6 | −1 | TTTT | TGACCTACATGTGGAAATAAATTT | 2253 | UGACCUACAUGUGGAAAUAAAUUU | 1180 |
| Human-Exon 6 | 1 | TTTT | CTTATGAAAATTTATTTCCACATG | 2254 | CUUAUGAAAAUUUAUUUCCACAUG | 1181 |
| Human-Exon 6 | 1 | TTTC | TTATGAAAATTTATTTCCACATGT | 2255 | UUAUGAAAAUUUAUUUCCACAUGU | 1182 |
| Human-Exon 6 | −1 | TTTC | ATTACATTTTTGACCTACATGTGG | 2256 | AUUACAUUUUUGACCUACAUGUGG | 1183 |
| Human-Exon 6 | −1 | TTTT | CATTACATTTTTGACCTACATGTG | 2257 | CAUUACAUUUUUGACCUACAUGUG | 1184 |
| Human-Exon 6 | −1 | TTTT | TCATTACATTTTTGACCTACATGT | 2258 | UCAUUACAUUUUUGACCUACAUGU | 1185 |
| Human-Exon 6 | 1 | TTTA | TTTCCACATGTAGGTCAAAAATGT | 2259 | UUUCCACAUGUAGGUCAAAAAUGU | 1186 |
| Human-Exon 6 | 1 | TTTC | CACATGTAGGTCAAAAATGTAATG | 2260 | CACAUGUAGGUCAAAAAUGUAAUG | 1187 |
| Human-Exon 6 | −1 | TTTG | TTGCAATCCAGCCATGATATTTTT | 2261 | UUGCAAUCCAGCCAUGAUAUUUUU | 1188 |
| Human-Exon 6 | −1 | TTTC | ACTGTTGGTTTGTTGCAATCCAGC | 2262 | ACUGUUGGUUUGUUGCAAUCCAGC | 1189 |
| Human-Exon 6 | −1 | TTTT | CACTGTTGGTTTGTTGCAATCCAG | 2263 | CACUGUUGGUUUGUUGCAAUCCAG | 1190 |
| Human-Exon 6 | 1 | TTTG | AATGCTCTCATCCATAGTCATAGG | 2264 | AAUGCUCUCAUCCAUAGUCAUAGG | 1191 |
| Human-Exon 6 | −1 | TTTA | ATGTCTCAGTAATCTTCTTACCTA | 2265 | AUGUCUCAGUAAUCUUCUUACCUA | 1192 |
| Human-Exon 6 | −1 | TTTA | CAAGTTATTTAATGTCTCAGTAAT | 2266 | CAAGUUAUUUAAUGUCUCAGUAAU | 1193 |
| Human-Exon 6 | −1 | TTTT | ACAAGTTATTTAATGTCTCAGTAA | 2267 | ACAAGUUAUUUAAUGUCUCAGUAA | 1194 |
| Human-Exon 6 | 1 | TTTA | GACTCTGATGACATATTTTTCCCC | 2268 | GACUCUGAUGACAUAUUUUUCCCC | 1195 |
| Human-Exon 6 | 1 | TTTT | TCCCCAGTATGGTTCCAGATCATG | 2269 | UCCCCAGUAUGGUUCCAGAUCAUG | 1196 |
| Human-Exon 6 | 1 | TTTT | CCCCAGTATGGTTCCAGATCATGT | 2270 | CCCCAGUAUGGUUCCAGAUCAUGU | 1197 |
| Human-Exon 6 | 1 | TTTC | CCCAGTATGGTTCCAGATCATGTC | 2271 | CCCAGUAUGGUUCCAGAUCAUGUC | 1198 |
| Human-Exon 7 | 1 | TTTA | TATTTGTCTTtgtgtatgtgtgta | 2272 | UAUUUGUCUUuguguaugugugua | 1199 |
| Human-Exon 7 | 1 | TTTG | TCTTtgtgtatgtgtgtatgtgta | 2273 | UCUUuguguauguguguaugugua | 1200 |
| Human-Exon 7 | 1 | TTtg | tgtatgtgtgtatgtgtatgtgtt | 2274 | uguauguguguauguguauguguu | 1201 |
| Human-Exon 7 | 1 | ttTT | AGGCCAGACCTATTTGACTGGAAT | 2275 | AGGCCAGACCUAUUUGACUGGAAU | 1202 |
| Human-Exon 7 | 1 | tTTA | GGCCAGACCTATTTGACTGGAATA | 2276 | GGCCAGACCUAUUUGACUGGAAUA | 1203 |
| Human-Exon 7 | 1 | TTTG | ACTGGAATAGTGTGGTTTGCCAGC | 2277 | ACUGGAAUAGUGUGGUUUGCCAGC | 1204 |
| Human-Exon 7 | 1 | TTTG | CCAGCAGTCAGCCACACAACGACT | 2278 | CCAGCAGUCAGCCACACAACGACU | 1205 |
| Human-Exon 7 | −1 | TTTC | TCTATGCCTAATTGATATCTGGCG | 2279 | UCUAUGCCUAAUUGAUAUCUGGCG | 1206 |
| Human-Exon 7 | −1 | TTTA | CCAACCTTCAGGATCGAGTAGTTT | 2280 | CCAACCUUCAGGAUCGAGUAGUUU | 1207 |
| Human-Exon 7 | 1 | TTTC | TGGACTACCACTGCTTTTAGTATG | 2281 | UGGACUACCACUGCUUUUAGUAUG | 1208 |
| Human-Exon 7 | 1 | TTTT | AGTATGGTAGAGTTTAATGTTTTC | 2282 | AGUAUGGUAGAGUUUAAUGUUUUC | 1209 |
| Human-Exon 7 | 1 | TTTA | GTATGGTAGAGTTTAATGTTTTCA | 2283 | GUAUGGUAGAGUUUAAUGUUUUCA | 1210 |
| Human-Exon 8 | −1 | TTTG | AGACTCTAAAAGGATAATGAACAA | 2284 | AGACUCUAAAAGGAUAAUGAACAA | 1211 |
| Human-Exon 8 | 1 | TTTA | ACTTTGATTTGTTCATTATCCTTT | 2285 | ACUUUGAUUUGUUCAUUAUCCUUU | 1212 |
| Human-Exon 8 | −1 | TTTC | TATATTTGAGACTCTAAAAGGATA | 2286 | UAUAUUUGAGACUCUAAAAGGAUA | 1213 |
| Human-Exon 8 | 1 | TTTG | ATTTGTTCATTATCCTTTTAGAGT | 2287 | AUUUGUUCAUUAUCCUUUUAGAGU | 1214 |
| Human-Exon 8 | −1 | TTTG | GTTTCTATATTTGAGACTCTAAAA | 2288 | GUUUCUAUAUUUGAGACUCUAAAA | 1215 |
| Human-Exon 8 | −1 | TTTT | GGTTTCTATATTTGAGACTCTAAA | 2289 | GGUUUCUAUAUUUGAGACUCUAAA | 1216 |
| Human-Exon 8 | −1 | TTTT | TGGTTTCTATATTTGAGACTCTAA | 2290 | UGGUUUCUAUAUUUGAGACUCUAA | 1217 |
| Human-Exon 8 | 1 | TTTG | TTCATTATCCTTTTAGAGTCTCAA | 2291 | UUCAUUAUCCUUUUAGAGUCUCAA | 1218 |
| Human-Exon 8 | 1 | TTTT | AGAGTCTCAAATATAGAAACCAAA | 2292 | AGAGUCUCAAAUAUAGAAACCAAA | 1219 |
| Human-Exon 8 | 1 | TTTA | GAGTCTCAAATATAGAAACCAAAA | 2293 | GAGUCUCAAAUAUAGAAACCAAAA | 1220 |
| Human-Exon 8 | −1 | TTTC | CACTTCCTGGATGGCTTCAATGCT | 2294 | CACUUCCUGGAUGGCUUCAAUGCU | 1221 |
| Human-Exon 8 | 1 | TTTT | GCCTCAACAAGTGAGCATTGAAGC | 2295 | GCCUCAACAAGUGAGCAUUGAAGC | 1222 |
| Human-Exon 8 | 1 | TTTG | CCTCAACAAGTGAGCATTGAAGCC | 2296 | CCUCAACAAGUGAGCAUUGAAGCC | 1223 |
| Human-Exon 8 | −1 | TTTA | GGTGGCCTTGGCAACATTTCCACT | 2297 | GGUGGCCUUGGCAACAUUUCCACU | 1224 |
| Human-Exon 8 | −1 | TTTA | GTCACTTTAGGTGGCCTTGGCAAC | 2298 | GUCACUUUAGGUGGCCUUGGCAAC | 1225 |
| Human-Exon 8 | −1 | TTTG | ATGATGTAACTGAAAATGTTCTTC | 2299 | AUGAUGUAACUGAAAAUGUUCUUC | 1226 |
| Human-Exon 8 | −1 | TTTA | CCTGTTGAGAATAGTGCATTTGAT | 2300 | CCUGUUGAGAAUAGUGCAUUUGAU | 1227 |
| Human-Exon 8 | 1 | TTTT | CAGTTACATCATCAAATGCACTAT | 2301 | CAGUUACAUCAUCAAAUGCACUAU | 1228 |
| Human-Exon 8 | 1 | TTTC | AGTTACATCATCAAATGCACTATT | 2302 | AGUUACAUCAUCAAAUGCACUAUU | 1229 |
| Human-Exon 8 | −1 | TTTA | CACACTTTACCTGTTGAGAATAGT | 2303 | CACACUUUACCUGUUGAGAAUAGU | 1230 |
| Human-Exon 8 | 1 | TTTT | CTGTTTTATATGCATTTTTAGGTA | 2304 | CUGUUUUAUAUGCAUUUUUAGGUA | 1231 |
| Human-Exon 8 | 1 | TTTC | TGTTTTATATGCATTTTTAGGTAT | 2305 | UGUUUUAUAUGCAUUUUUAGGUAU | 1232 |
| Human-Exon 8 | 1 | TTTT | ATATGCATTTTTAGGTATTACGTG | 2306 | AUAUGCAUUUUUAGGUAUUACGUG | 1233 |
| Human-Exon 8 | 1 | TTTA | TATGCATTTTTAGGTATTACGTGC | 2307 | UAUGCAUUUUUAGGUAUUACGUGC | 1234 |
| Human-Exon 8 | 1 | TTTT | TAGGTATTACGTGCACatatatat | 2308 | UAGGUAUUACGUGCACauauauau | 1235 |
| Human-Exon 8 | 1 | TTTT | AGGTATTACGTGCACatatatata | 2309 | AGGUAUUACGUGCACauauauaua | 1236 |
| Human-Exon 8 | 1 | TTTA | GGTATTACGTGCACatatatatat | 2310 | GGUAUUACGUGCACauauauauau | 1237 |
| Human-Exon 55 | −1 | TTTA | AGCAACAACTATAATATTGTGCAG | 2311 | AGCAACAACUAUAAUAUUGUGCAG | 1238 |
| Human-Exon 55 | 1 | TTTA | GTTCCTCCATCTTTCTCTTTTTAT | 2312 | GUUCCUCCAUCUUUCUCUUUUUAU | 1239 |
| Human-Exon 55 | 1 | TTTC | TCTTTTTATGGAGTTCACTAGGTG | 2313 | UCUUUUUAUGGAGUUCACUAGGUG | 1240 |
| Human-Exon 55 | 1 | TTTT | TATGGAGTTCACTAGGTGCACCAT | 2314 | UAUGGAGUUCACUAGGUGCACCAU | 1241 |
| Human-Exon 55 | 1 | TTTT | ATGGAGTTCACTAGGTGCACCATT | 2315 | AUGGAGUUCACUAGGUGCACCAUU | 1242 |
| Human-Exon 55 | 1 | TTTA | TGGAGTTCACTAGGTGCACCATTC | 2316 | UGGAGUUCACUAGGUGCACCAUUC | 1243 |
| Human-Exon 55 | 1 | TTTA | ATAATTGCATCTGAACATTTGGTC | 2317 | AUAAUUGCAUCUGAACAUUUGGUC | 1244 |
| Human-Exon 55 | 1 | TTTG | GTCCTTTGCAGGGTGAGTGAGCGA | 2318 | GUCCUUUGCAGGGUGAGUGAGCGA | 1245 |
| Human-Exon 55 | −1 | TTTC | TTCCAAAGCAGCCTCTCGCTCACT | 2319 | UUCCAAAGCAGCCUCUCGCUCACU | 1246 |
| Human-Exon 55 | 1 | TTTG | CAGGGTGAGTGAGCGAGAGGCTGC | 2320 | CAGGGUGAGUGAGCGAGAGGCUGC | 1247 |
| Human-Exon 55 | 1 | TTTG | GAAGAAACTCATAGATTACTGCAA | 2321 | GAAGAAACUCAUAGAUUACUGCAA | 1248 |
| Human-Exon 55 | −1 | TTTC | CAGGTCCAGGGGGAACTGTTGCAG | 2322 | CAGGUCCAGGGGGAACUGUUGCAG | 1249 |
| Human-Exon 55 | −1 | TTTT | CCAGGTCCAGGGGGAACTGTTGCA | 2323 | CCAGGUCCAGGGGGAACUGUUGCA | 1250 |
| Human-Exon 55 | −1 | TTTC | AGCTTCTGTAAGCCAGGCAAGAAA | 2324 | AGCUUCUGUAAGCCAGGCAAGAAA | 1251 |
| Human-Exon 55 | 1 | TTTC | TTGCCTGGCTTACAGAAGCTGAAA | 2325 | UUGCCUGGCUUACAGAAGCUGAAA | 1252 |
| Human-Exon 55 | −1 | TTTC | CTTACGGGTAGCATCCTGTAGGAC | 2326 | CUUACGGGUAGCAUCCUGUAGGAC | 1253 |
| Human-Exon 55 | −1 | TTTA | CTCCCTTGGAGTCTTCTAGGAGCC | 2327 | CUCCCUUGGAGUCUUCUAGGAGCC | 1254 |
| Human-Exon 55 | −1 | TTTT | ACTCCCTTGGAGTCTTCTAGGAGC | 2328 | ACUCCCUUGGAGUCUUCUAGGAGC | 1255 |
| Human-Exon 55 | −1 | TTTC | ATCAGCTCTTTTACTCCCTTGGAG | 2329 | AUCAGCUCUUUUACUCCCUUGGAG | 1256 |
| Human-Exon 55 | 1 | TTTC | CGCTTTAGCACTCTTGTGGATCCA | 2330 | CGCUUUAGCACUCUUGUGGAUCCA | 1257 |
| Human-Exon 55 | 1 | TTTA | GCACTCTTGTGGATCCAATTGAAC | 2331 | GCACUCUUGUGGAUCCAAUUGAAC | 1258 |
| Human-Exon 55 | −1 | TTTG | TCCCTGGCTTGTCAGTTACAAGTA | 2332 | UCCCUGGCUUGUCAGUUACAAGUA | 1259 |
| Human-Exon 55 | −1 | TTTT | GTCCCTGGCTTGTCAGTTACAAGT | 2333 | GUCCCUGGCUUGUCAGUUACAAGU | 1260 |
| Human-Exon 55 | −1 | TTTG | TTTTGTCCCTGGCTTGTCAGTTAC | 2334 | UUUUGUCCCUGGCUUGUCAGUUAC | 1261 |
| Human-Exon 55 | −1 | TTTT | GTTTTGTCCCTGGCTTGTCAGTTA | 2335 | GUUUUGUCCCUGGCUUGUCAGUUA | 1262 |
| Human-Exon 55 | 1 | TTTG | TACTTGTAACTGACAAGCCAGGGA | 2336 | UACUUGUAACUGACAAGCCAGGGA | 1263 |
| Human-G1- | 1 | TTTA | gCTCCTACTCAGACTGTTACTCTG | 2337 | gCUCCUACUCAGACUGUUACUCUG | 1264 |
| exon51 | | | | | | |
| Human-G2- | 1 | TTTC | taccatgtattgctaaacaaagta | 2338 | uaccauguauugcuaaacaaagua | 1265 |
| exon51 | | | | | | |
| Human-G3- | −1 | TTTA | attgaagagtaacaatttgagcca | 2339 | auugaagaguaacaauuugagcca | 1266 |
| exon51 | | | | | | |
| mouse-Exon23- | 1 | TTTG | aggctctgcaaagttctTTGAAAG | 2340 | aggcucugcaaaguucuUUGAAAG | 1267 |
| G1 | | | | | | |
| mouse-Exon23- | 1 | TTTG | AAAGAGCAACAAAATGGCttcaac | 2341 | AAAGAGCAACAAAAUGGCuucaac | 1268 |
| G2 | | | | | | |
| mouse-Exon23- | 1 | TTTG | AAAGAGCAATAAAATGGCttcaac | 2342 | AAAGAGCAAUAAAAUGGCuucaac | 1269 |
| G3 | | | | | | |
| mouse-Exon23- | −1 | TTTC | AAAGAACTTTGCAGAGCctcaaaa | 2343 | AAAGAACUUUGCAGAGCcucaaaa | 1270 |
| G4 | | | | | | |
| mouse-Exon23- | −1 | TTTA | ctgaatatctatgcattaataact | 2344 | cugaauaucuaugcauuaauaacu | 1271 |
| G5 | | | | | | |
| mouse-Exon23- | −1 | TTTC | tattatattacagggcatattata | 2345 | uauuauauuacagggcauauuaua | 1272 |
| G6 | | | | | | |
| mouse-Exon23- | 1 | TTTC | Aggtaagccgaggtttggccttta | 2346 | Agguaagccgagguuuggccuuua | 1273 |
| G7 | | | | | | |
| mouse-Exon23- | 1 | TTTA | cccagagtccttcaaagatattga | 2347 | cccagaguccuucaaagauauuga | 1274 |
| G8 | | | | | | |

*In this table, upper case letters represent sgRNA nucleotides that align to the exon sequence of the gene. Lower case letters represent sgRNA nucleotides that align to the intron sequence of the gene

TABLE 15
Additional gRNA targeting sequences

| | | | | | | SEQ | |
|---|---|---|---|---|---|---|---|
| Name | Species | Gene | Target | Strand | Sequence | ID NO | PAM |
| DCR | Human | DMD | Intron | + | attggctttgatttcccta | 1275 | GGG |
| 1 | 50 | | | | | | |
| DCR | Human | DMD | Intron | − | tgtagagtaagtcagccta | 1276 | TGG |
| 2 | 50 | | | | | | |
| DCR | Human | DMD | Exon | + | cctactcagactgttactc | 1277 | TGG |
| 3 | 51-55′ | | | | | | |
| DCR | Human | DMD | Exon | + | ttggacagaacttaccgac | 1278 | TGG |
| 4 | 51-53′ | | | | | | |
| DCR | Human | DMD | Intron | − | cagttgcctaagaactggt | 1279 | GGG |
| 5 | 51 | | | | | | |
| DCR | Human | DMD | Intron | − | GGGCTCCACCCTCACGAGT | 1280 | GGG |
| 6 | 44 | | | | | | |
| DCR | Human | DMD | Intron | + | TTTGCTTCGCTATAAAACG | 1281 | AGG |
| 7 | 55 | | | | | | |
| DCR | Human | DMD | Exon 41 | + | TCTGAGGATGGGCCGCAA | 1282 | TGG |
| 8 | | | | | | | |
| DCR | Human | DMD | Exon 44 | − | GATCTGTCAAATCGCCTGG | 1283 | AGG |
| 9 | | | | | | | |
| DCR | Human | DMD | Exon 45 | + | CCAGGATGGCATTGGGCAG | 1284 | CGG |
| 10 | | | | | | | |
| DCR | Human | DMD | Exon 45 | + | CTGAATCTGCGGTGGCAGG | 1285 | AGG |
| 11 | | | | | | | |
| DCR | Human | DMD | Exon 46 | − | TTCTTTTGTTCTTCTAGCc | 1286 | TGG |
| 12 | | | | | | | |
| DCR | Human | DMD | Exon 46 | + | GAAAAGCTTGAGCAAGTCA | 1287 | AGG |
| 13 | | | | | | | |
| DCR | Human | DMD | Exon 47 | + | GAAGAGTTGCCCCTGCGCC | 1288 | AGG |
| 14 | | | | | | | |
| DCR | Human | DMD | Exon 47 | + | ACAAATCTCCAGTGGATAA | 1289 | AGG |
| 15 | | | | | | | |
| DCR | Human | DMD | Exon 48 | − | TGTTTCTCAGGTAAAGCTC | 1290 | TGG |
| 16 | | | | | | | |
| DCR | Human | DMD | Exon 48 | + | GAAGGACCATTTGACGTTa | 1291 | AGG |
| 17 | | | | | | | |
| DCR | Human | DMD | Exon 49 | − | AACTGCTATTTCAGTTTCc | 1292 | TGG |
| 18 | | | | | | | |
| DCR | Human | DMD | Exon 49 | + | CCAGCCACTCAGCCAGTGA | 1293 | AGG |
| 19 | | | | | | | |
| DCR | Human | DMD | Exon 50 | + | gtatgcttttctgttaaag | 1294 | AGG |
| 20 | | | | | | | |
| DCR | Human | DMD | Exon 50 | + | CTCCTGGACTGACCACTAT | 1295 | TGG |
| 21 | | | | | | | |
| DCR | Human | DMD | Exon 52 | + | GAACAGAGGCGTCCCCAGT | 1296 | TGG |
| 22 | | | | | | | |
| DCR | Human | DMD | Exon 52 | + | GAGGCTAGAACAATCATTA | 1297 | CGG |
| 23 | | | | | | | |
| DCR | Human | DMD | Exon 53 | + | ACAAGAACACCTTCAGAAC | 1298 | CGG |
| 24 | | | | | | | |
| DCR | Human | DMD | Exon 53 | − | GGTTTCTGTGATTTTCTTT | 1299 | TGG |
| 25 | | | | | | | |
| DCR | Human | DMD | Exon 54 | + | GGCCAAAGACCTCCGCCAG | 1300 | TGG |
| 26 | | | | | | | |
| DCR | Human | DMD | Exon 54 | + | TTGGAGAAGCATTCATAAA | 1301 | AGG |
| 27 | | | | | | | |
| DCR | Human | DMD | Exon 55 | − | TCGCTCACTCACCctgcaa | 1302 | AGG |
| 28 | | | | | | | |
| DCR | Human | DMD | Exon 55 | + | AAAAGAGCTGATGAAACAA | 1303 | TGG |
| 29 | | | | | | | |
| DCR | Human | DMD | 5′UTR/ | + | TAcACTTTTCaAAATGCTT | 1304 | TGG |
| 30 | | | Exon 1 | | | | |
| DCR | Human | DMD | Exon 51 | + | gagatgatcatcaagcaga | 1305 | AGG |
| 31 | | | | | | | |
| DCR | Mouse | DMD | mdx | + | ctttgaaagagcaaTaaaa | 1306 | TGG |
| 32 | | | | | | | |
| DCR | Human | DMD | Intron | − | CACAAAAGTCAAATCGGAA | 1307 | TGG |
| 33 | | | 44 | | | | |
| DCR | Human | DMD | Intron | − | ATTTCAATATAAGATTCGG | 1308 | AGG |
| 34 | | | 44 | | | | |
| DCR | Human | DMD | Intron | − | CTTAAGCAATCCCGAACTC | 1309 | TGG |
| 35 | | | 55 | | | | |
| DCR | Human | DMD | Intron | − | CCTTCTTTATCCCCTATCG | 1310 | AGG |
| 36 | | | 55 | | | | |
| DCR | Mouse | DMD | Exon 23 | − | aggccaaacctcggcttac | 1311 | NNGRR |
| 40 | | | | | | | |
| DCR | Mouse | DMD | Exon 23 | + | TTCGAAAATTTCAGgtaag | 1312 | NNGRR |
| 41 | | | | | | | |
| DCR | Mouse | DMD | Exon 23 | + | gcagaacaggagataacag | 1313 | NNGRRT |
| 42 | | | | | | | |
| DCR | Mouse | ACVR | Exon 1 | + | gcggccctcgcccttctct | 1314 | ggggat |
| 43 | | 2B | | | | | |
| DCR | Human | DMD | Intron | − | TAGTGATCGTGGATACGAG | 1315 | AGG |
| 48 | | | 45 | | | | |
| DCR | Human | DMD | Intron | − | TACAGCCCTCGGTGTATAT | 1316 | TGG |
| 49 | | | 45 | | | | |
| DCR | Human | DMD | Intron | − | GGAAGGAATTAAGCCCGAA | 1317 | TGG |
| 50 | | | 52 | | | | |
| DCR | Human | DMD | Intron | − | GGAACAGCTTTCGTAGTTG | 1318 | AGG |
| 51 | | | 53 | | | | |
| DCR | Human | DMD | Intron | + | ATAAAGTCCAGTGTCGATC | 1319 | AGG |
| 52 | | | 54 | | | | |
| DCR | | | Intron | + | AAAACCAGAGCTTCGGTCA | 1320 | AGG |
| 53 | | | 54 | | | | |
| DCR | Mouse | Rosa | ZFN | + | GAGTCTTCTGGGCAGGCTTAA | 1321 | TGG |
| 54 | | 26 | region | | | | |
| DCR | Mouse | Rosa | mRNA | − | TCGGGTGAGCATGTCTTTAAT | 1322 | TGG |
| 55 | | 26 | | | | | |
| DCR | Human | DMD | Ex 51 | − | gtgtcaccagagtaacagt | 1323 | ctgagt |
| 49 | | | | | | | |
| DCR | Human | DMD | Ex 51 | − | tgatcatcaagcagaaggt | 1324 | atgag |
| 50 | | | | | | | |
| DCR | Mouse | DMD | Exon 23 | + | AACTTCGAAAATTTCAGgta | 1325 | agccga |
| 60 | | | | | | | |
| DCR | Mouse | DMD | Intron | + | gaaactcatcaaatatgcgt | 1326 | gttagt |
| 61 | | | 22 | | | | gt |
| DCR | Mouse | DMD | Intron | − | tcatttacactaacacgcat | 1327 | atttqa |
| 62 | | | 22 | | | | tg |
| DCR | Mouse | DMD | Intron | + | gaatgaaactcatcaaatat | 1328 | gcgtgt |
| 63 | | | 22 | | | | ta |
| DCR | Mouse | DMD | Intron | − | tcatcaatatctttgaagga | 1329 | ctctgg |
| 64 | | | 23 | | | | gt |
| DCR | Mouse | DMD | Intron | − | tgttttcataggaaaaatag | 1330 | gcaagt |
| 65 | | | 23 | | | | tg |
| DCR | Mouse | DMD | Intron | + | aattggaaaatgtgatggga | 1331 | aacaga |
| 66 | | | 23 | | | | ta |
| DCR | Human | DMD | Exon 51 | + | atgatcatcaagcagaaggt | 1332 | atgaga |
| 67 | | | | | | | aa |
| DCR | Human | DMD | Exon 51 | + | agatgatcatcaagcagaag | 1333 | gtatga |
| 68 | | | | | | | ga |
| DCR | Human | DMD | Exon 51 | − | cattttttatcatacattct | 1334 | gcttga |
| 69 | | | | | | | tg |
| DCR | Human | DMD | Exon 51 | + | tcctactcagactgttactc | 1335 | tggtga |
| 70 | | | | | | | ca |
| DCR | Human | DMD | Exon 51 | − | acaggttgtgtcaccagagt | 1336 | aacagt |
| 71 | | | | | | | ct |
| DCR | Human | DMD | Exon 51 | − | ttatcattttttctcatacc | 1337 | ttctgc |
| 72 | | | | | | | tt |
| DCR | Human | DMD | Intron | − | ttgcctaagaactggtggga | 1338 | aatggt |
| 73 | | | 51 | | | | ct |
| DCR | Human | DMD | Intron | − | aaacagttgcctaagaactg | 1339 | gtggga |
| 74 | | | 51 | | | | aa |
| DCR | Human | DMD | Intron | + | tttcccaccagttcttaggc | 1340 | aactgt |
| 75 | | | 51 | | | | tt |
| DCR | Human | DMD | Intron | + | tggctttgatttccctaggg | 1341 | tccagc |
| 76 | | | 50 | | | | tt |
| DCR | Human | DMD | Intron | − | tagggaaatcaaagccaatg | 1342 | aaacqt |
| 77 | | | 50 | | | | tc |
| DCR | Human | DMD | Intron | − | gaccctagggaaatcaaagc | 1343 | caatga |
| 78 | | | 50 | | | | aa |
| DCR | Human | DMD | Intron | − | TGAGGGCTCCACCCTCACGA | 1344 | GTGGGT |
| 79 | | | 44 | | | | TT |
| DCR | Human | DMD | Intron | − | AAGGATTGAGGGCTCCACCC | 1345 | TCACGA |
| 80 | | | 44 | | | | GT |
| DCR | Human | DMD | Intron | − | GCTCCACCCTCACGAGTGGG | 1346 | TTTGGT |
| 81 | | | 44 | | | | TC |
| DCR | Human | DMD | Intron | − | TATCCCCTATCGAGGAAACC | 1347 | ACGAGT |
| 82 | | | 55 | | | | TT |
| DCR | Human | DMD | Intron | + | GATAAAGAAGGCCTATTTCA | 1348 | TAGAGT |
| 83 | | | 55 | | | | TG |
| DCR | Human | DMD | Intron | − | AGGCCTTCTTTATCCCCTAT | 1349 | CGAGGA |
| 84 | | | 55 | | | | AA |
| DCR | Human | DMD | Intron | − | TGAGGGCTCCACCCTCACGA | 1350 | GTGGGT |
| 85 | | | 44 | | | | |
| DCR | Human | DMD | Intron | + | GATAAAGAAGGCCTATTTCA | 1351 | TAGAGT |
| 86 | | | 55 | | | | |
| DCR | Human | DMD | Intron | + | attggctttgatttcccta | 1352 | GGG |
| 1 | | | 50 | | | | |
| DCR | Human | DMD | Intron | − | tgtagagtaagtcagccta | 1353 | TGG |
| 2 | | | 50 | | | | |
| DCR | Human | DMD | Exon | + | cctactcagactgttactc | 1354 | TGG |
| 3 | | | 51-5′ | | | | |
| DCR | Human | DMD | Exon | + | ttggacagaacttaccgac | 1355 | TGG |
| 4 | | | 51-3′ | | | | |
| DCR | Human | DMD | Intron | − | cagttgcctaagaactggt | 1356 | GGG |
| 5 | | | 51 | | | | |
| DCR | Human | DMD | Intron | − | GGGCTCCACCCTCACGAGT | 1357 | GGG |
| 6 | | | 44 | | | | |
| DCR | Human | DMD | Intron | + | TTTGCTTCGCTATAAAACG | 1358 | AGG |
| 7 | | | 55 | | | | |
| DCR | Human | DMD | Exon 41 | + | TCTGAGGATGGGGCCGCAA | 1359 | TGG |
| 8 | | | | | | | |
| DCR | Human | DMD | Exon 44 | − | GATCTGTCAAATCGCCTGC | 1360 | AGG |
| 9 | | | | | | | |
| DCR | Human | DMD | Exon 45 | + | CCAGGATGGCATTGGGCAG | 1361 | CGG |
| 10 | | | | | | | |
| DCR | Human | DMD | Exon 45 | + | CTGAATCTGCGGTGGCAGG | 1362 | AGG |
| 11 | | | | | | | |
| DCR | Human | DMD | Exon 46 | − | TTCTTTTGTTCTTCTAGCc | 1363 | TGG |
| 12 | | | | | | | |
| DCR | Human | DMD | Exon 46 | + | GAAAAGCTTGAGCAAGTCA | 1364 | AGG |
| 13 | | | | | | | |
| DCR | Human | DMD | Exon 47 | + | GAAGAGTTGCCCCTGCGCC | 1365 | AGE |
| 14 | | | | | | | |
| DCR | Human | DMD | Exon 47 | + | ACAAATCTCCAGTGGATAA | 1366 | AGE |
| 15 | | | | | | | |
| DCR | Human | DMD | Exon 48 | − | TGTTTCTCAGGTAAAGCTC | 1367 | TGG |
| 16 | | | | | | | |
| DCR | Human | DMD | Exon 48 | + | GAAGGACCATTTGACGTTa | 1368 | AGG |
| 17 | | | | | | | |
| DCR | Human | DMD | Exon 49 | − | AACTGCTATTTCAGTTTCc | 1369 | TGG |
| 18 | | | | | | | |
| DCR | Human | DMD | Exon 49 | + | CCAGCCACTCAGCCAGTGA | 1370 | AGG |
| 19 | | | | | | | |
| DCR | Human | DMD | Exon 50 | + | gtatgcttttctgttaaag | 1371 | AGG |
| 20 | | | | | | | |
| DCR | Human | DMD | Exon 50 | + | CTCCTGGACTGACCACTAT | 1372 | TGG |
| 21 | | | | | | | |
| DCR | Human | DMD | Exon 52 | + | GAACAGAGGCGTCCCCAGT | 1373 | TGG |
| 22 | | | | | | | |
| DCR | Human | DMD | Exon 52 | + | GAGGCTAGAACAATCATTA | 1374 | CGG |
| 23 | | | | | | | |
| DCR | Human | DMD | Exon 53 | + | ACAAGAACACCTTCAGAAC | 1375 | CGG |
| 24 | | | | | | | |
| DCR | Human | DMD | Exon 53 | − | GGTTTCTGTGATTTTCTTT | 1376 | TGG |
| 25 | | | | | | | |
| DCR | Human | DMD | Exon 54 | + | GGCCAAAGACCTCCGCCAG | 1377 | TGG |
| 26 | | | | | | | |
| DCR | Human | DMD | Exon 54 | + | TTGGAGAAGCATTCATAAA | 1378 | AGG |
| 27 | | | | | | | |
| DCR | Human | DMD | Exon 55 | − | TCGCTCACTCACCctgcaa | 1379 | AGG |
| 28 | | | | | | | |
| DCR | Human | DMD | Exon 55 | + | AAAAGAGCTGATGAAACAA | 1380 | TGG |
| 29 | | | | | | | |
| DCR | Human | DMD | 5′UTR/ | + | TAcACTTTTCaAAATGCTT | 1381 | TGG |
| 30 | | | Exon 1 | | | | |
| DCR | Human | DMD | Exon 51 | + | gagatgatcatcaagcaga | 1382 | AGG |
| 31 | | | | | | | |
| DCR | Mouse | DMD | mdx | + | ctttgaaagagcaaTaaaa | 1383 | TGG |
| 32 | | | | | | | |
| DCR | Human | DMD | Intron | − | CACAAAAGTCAAATCGGAA | 1384 | TGG |
| 33 | | | 44 | | | | |
| DCR | Human | DMD | Intron | − | ATTTCAATATAAGATTCGG | 1385 | AGG |
| 34 | | | 44 | | | | |
| DCR | Human | DMD | Intron | − | CTTAAGCAATCCCGAACTC | 1386 | TGG |
| 35 | | | 55 | | | | |
| DCR | Human | DMD | Intron | − | CCTTCTTTATCCCCTATCG | 1387 | AGG |
| 36 | | | 55 | | | | |
| DCR | Mouse | DMD | Exon 23 | − | aggccaaacctcggcttac | 1388 | NNGRR |
| 40 | | | | | | | |
| DCR | Mouse | DMD | Exon 23 | + | TTCGAAAATTTCAGgtaag | 1389 | NNGRR |
| 41 | | | | | | | |
| DCR | Mouse | DMD | Exon 23 | + | gcagaacaggagataacag | 1390 | NNGRRT |
| 42 | | | | | | | |
| DCR | Mouse | ACVR | Exon 1 | + | gcggccctcgccdctctct | 1391 | ggggat |
| 43 | | 2B | | | | | |
| DCR | Human | DMD | Intron | − | TAGTGATCGTGGATACGAG | 1392 | AGG |
| 48 | | | 45 | | | | |
| DCR | Human | DMD | Intron | − | TACAGCCCTCGGTGTATAT | 1393 | TGG |
| 49 | | | 45 | | | | |
| DCR | Human | DMD | Intron | − | GGAAGGAATTAAGCCCGAA | 1394 | TGG |
| 50 | | | 52 | | | | |
| DCR | Human | DMD | Intron | − | GGAACAGCTTTCGTAGTTG | 1395 | AGG |
| 51 | | | 53 | | | | |
| DCR | Human | DMD | Intron | + | ATAAAGTCCAGTGTCGATC | 1396 | AGG |
| 52 | | | 54 | | | | |
| DCR | Human | DMD | Intron | + | AAAACCAGAGCTTCGGTCA | 1397 | AGG |
| 53 | | | 54 | | | | |
| DCR | Mouse | Rosa | ZFN | + | GAGTCTTCTGGGCAGGCTTAA | 1398 | TGG |
| 54 | | 26 | region | | | | |
| DCR | Mouse | Rosa | mRNA | − | TCGGGTGAGCATGTCTTTAAT | 1299 | TGG |
| 55 | | 26 | | | | | |
| DCR | Human | DMD | Ex 51 | − | gtgtcaccagagtaacagt | 1400 | ctgagt |
| 49 | | | | | | | |
| DCR | Human | DMD | Ex 51 | + | tgatcatcaagcagaaggt | 1401 | atgag |
| 50 | | | | | | | |
| DCR | Mouse | DMD | Exon 23 | + | AACTTCGAAAATTTCAGgta | 1402 | agccga |
| 60 | | | | | | | gg |
| DCR | Mouse | DMD | Intron | + | gaaactcatcaaatatgcgt | 1403 | gttagt |
| 61 | | | 22 | | | | gt |
| DCR | Mouse | DMD | Intron | − | tcatttacactaacacgcat | 1404 | atttga |
| 62 | | | 22 | | | | tg |
| DCR | Mouse | DMD | Intron | + | gaatgaaactcatcaaatat | 1405 | gcgtgt |
| 63 | | | 22 | | | | ta |
| DCR | Mouse | DMD | Intron | − | tcatcaatatctttgaagga | 1406 | ctctgg |
| 64 | | | 23 | | | | gt |
| DCR | Mouse | DMD | Intron | − | tgttttcataggaaaaatag | 1407 | gcaagt |
| 65 | | | 23 | | | | tg |
| DCR | Mouse | DMD | Intron | + | aattggaaaatgtgatggga | 1408 | aacaga |
| 66 | | | 23 | | | | ta |
| DCR | Human | DMD | Exon 51 | + | atgatcatcaagcagaaggt | 1409 | atgaga |
| 67 | | | | | | | aa |
| DCR | Human | DMD | Exon 51 | + | agatgatcatcaagcagaag | 1410 | gtatga |
| 68 | | | | | | | ga |
| DCR | Human | DMD | Exon 51 | − | cattttttctcataccttct | 1411 | gcttga |
| 69 | | | | | | | tg |
| DCR | Human | DMD | Exon 51 | + | tcctactcagactgttactc | 1412 | tggtga |
| 70 | | | | | | | ca |
| DCR | Human | DMD | Exon 51 | − | acaggttgtgtcaccagagt | 1413 | aacagt |
| 71 | | | | | | | ct |
| DCR | Human | DMD | Exon 51 | − | ttatcattttttctcatacc | 1414 | ttctgc |
| 72 | | | | | | | tt |
| DCR | Human | DMD | Intron | − | ttgcctaagaactggtggga | 1415 | aatggt |
| 73 | | | 51 | | | | ct |
| DCR | Human | DMD | Intron | − | aaacagttgcctaagaactg | 1416 | gtggga |
| 74 | | | 51 | | | | aa |
| DCR | Human | DMD | Intron | + | tttcccaccagttcttaggc | 1417 | aactgt |
| 75 | | | 51 | | | | tt |
| DCR | Human | DMD | Intron | + | tggctttgatttccctaggg | 1418 | tccagc |
| 76 | | | 50 | | | | tt |
| DCR | Human | DMD | Intron | − | tagggaaatcaaagccaatg | 1419 | aaacgt |
| 77 | | | 50 | | | | tc |
| DCR | Human | DMD | Intron | − | gaccctagggaaatcaaagc | 1420 | caatga |
| 78 | | | 50 | | | | aa |
| DCR | Human | DMD | Intron | − | TGAGGGCTCCACCCTCACGA | 1421 | GTGGGT |
| 79 | | | 44 | | | | TT |
| DCR | Human | DMD | Intron | − | AAGGATTGAGGGCTCCACCC | 1422 | TCACGA |
| 80 | | | 44 | | | | GT |
| DCR | Human | DMD | Intron | − | GCTCCACCCTCACGAGTGGG | 1423 | TTTGGT |
| 81 | | | 44 | | | | TC |
| DCR | Human | DMD | Intron | − | TATCCCCTATCGAGGAAACC | 1424 | ACGAGT |
| 82 | | | 55 | | | | TT |
| DCR | Human | DMD | Intron | + | GATAAAGAAGGCCTATTTCA | 1425 | TAGAGT |
| 83 | | | 55 | | | | TG |
| DCR | Human | DMD | Intron | − | AGGCCTTCTTTATCCCCTAT | 1426 | CGAGGA |
| 84 | | | 55 | | | | AA |
| DCR | Human | DMD | Intron | − | TGAGGGCTCCACCCTCACGA | 1427 | GTGGGT |
| 85 | | | 44 | | | | |
| DCR | Human | DMD | Intron | + | GATAAAGAAGGCCTATTTCA | 1428 | TAGAGT |
| 86 | | | 55 | | | | |
| | | DMD | | | UAGAAGAUCUGAGCUCUGAG | 1429 | |
| | | DMD | | | AGAUCUGAGCUCUGAGUGGA | 1430 | |
| | | DMD | | | UCUGAGCUCUGAGUGGAAGG | 1431 | |
| | | DMD | | | CCGUUUACUUCAAGAGCUGA | 1432 | |
| | | DMD | | | AAGCAGCCUGACCUAGCUCC | 1433 | |
| | | DMD | | | GCUCCUGGACUGACCACUAU | 1434 | |
| | | DMD | | | CCCUCAGCUCUUGAAGUAAA | 1435 | |
| | | DMD | | | GUCAGUCCAGGAGCUAGGUC | 1436 | |
| | | DMD | | | UAGUGGUCAGUCCAGGAGCU | 1437 | |
| | | DMD | | | GCUCCAAUAGUGGUCAGUCC | 1438 | |
| | | DMD | | | UGGCCAAAGACCUCCGCCAG | 1439 | |
| | | DMD | | | GUGGCAGACAAAUGUAGAUG | 1440 | |
| | | DMD | | | UGUAGAUGUGGCAAAUGACU | 1441 | |
| | | DMD | | | CUUGGCCCUGAAACUUCUCC | 1442 | |
| | | DMD | | | CAGAGAAUAUCAAUGCCUCU | 1443 | |
| | | DMD | | | CAGAGAAUAUCAAUGCCUCU | 1444 | |
| | | DMD | | | CAUUUGUCUGCCACUGGCGG | 1445 | |
| | | DMD | | | CUACAUUUGUCUGCCACUGG | 1446 | |
| | | DMD | | | CAUCUACAUUUGUCUGCCAC | 1447 | |
| | | DMD | | | AUAAUCCCGGAGAAGUUUCA | 1448 | |
| | | DMD | | | UAUCAUCUGCAGAAUAAUCC | 1449 | |
| | | DMD | | | UGUUAUCAUGUGGACUUUUC | 1450 | |
| | | DMD | | | UGAUAUAUCAUUUCUCUGUG | 1451 | |
| | | DMD | | | UUUAUGAAUGCUUCUCCAAG | 1452 | |
| | | DMD | | | UUCUCCAGGCUAGAAGAACAA | 1453 | |
| | | DMD | | | CUGCUCUUUUCCAGGUUCAAG | 1454 | |
| | | DMD | | | GUCUGUUUCAGUUACUGGUGG | 1455 | |
| | | DMD | | | UCCAGUUUCAUUUAAUUGUUU | 1456 | |
| | | DMD | | | CUUAUGGGAGCACUUACAAGC | 1457 | |
| | | DMD | | | UUGCUUCAUUACCUUCACUGG | 1458 | |
| | | DMD | | | UUGUGUCACCAGAGUAACAGU | 1459 | |
| | | DMD | | | AGUAACCACAGGUUGUGUCAC | 1460 | |
| | | DMD | | | UUCAAAUUUUGGGCAGCGGUA | 1461 | |
| | | DMD | | | CAAGAGGCUAGAACAAUCAUU | 1462 | |
| | | DMD | | | UUGUACUUCAUCCCACUGAUU | 1463 | |
| | | DMD | | | CUUCAGAACCGGAGGCAACAG | 1464 | |
| | | DMD | | | CAACAGUUGAAUGAAAUGUUA | 1465 | |
| | | DMD | | | GCCAAGCUUGAGUCAUGGAAG | 1466 | |
| | | DMD | | | CUUGGUUUCUGUGAUUUUCUU | 1467 | |
| | | DMD | | | UCAUUUCACAGGCCUUCAAGA | 1468 | |
| | | DMD | | | CAGAAAUAUUCGUACAGUCUC | 1469 | |
| | | DMD | | | CAAUUACCUCUGGGCUCCUGG | 1470 | |
| | | DMD | | | GATACTAGGGTGGCAAATAG | 1471 | |
| | | DMD | | | GTGTTCTTAAAAGAATGGTG | 1472 | |
| | | DMD | | | GTCAAGAACAGCTGCAGAAC | 1473 | |
| | | DMD | | | GCAGTTGAATGAAATGTTAA | 1474 | |
| | | DMD | | | GATACTAGTGTGGCTCATAG | 1475 | |
| | | DMD | | | GATACGATGGTGGCAAATCG | 1476 | |
| | | DMD | | | GATACTAGGGTGGGGAATAA | 1477 | |
| | | DMD | | | TTTTTCTTAAAAGAATGGTA | 1478 | |
| | | DMD | | | TTGATCTTAGAAGAATGGTG | 1479 | |
| | | DMD | | | GTTTTCTTGAAAAAATGGTG | 1480 | |
| | | DMD | | | CTGTTCTTAAAAGGTTGGTG | 1481 | |
| | | DMD | | | GAGTTCTTCAAAGAATAGTG | 1482 | |
| | | DMD | | | TCTAGGGCAGCTGCAGAAC | 1483 | |
| | | DMD | | | TCATTCACAGCTGCAGAAC | 1484 | |
| | | DMD | | | CAAAGAATAGCTGCAGAAC | 1485 | |
| | | DMD | | | TCAAGAACAGCTGCAGCAG | 1486 | |
| | | DMD | | | TCAAGAACAGCTGCATCAC | 1487 | |
| | | DMD | | | CAGTTACATGAAATGTTAA | 1488 | |
| | | DMD | | | CATTTTAATGAAATGTTAA | 1489 | |
| | | DMD | | | AAGTTGAATGAAATTTTAA | 1490 | |
| | | DMD | | | CAGTGGAATAAAATGTTAA | 1491 | |
| | | DMD | | | AAAGATATATAATGTCATGAAT | 1492 | |
| | | DMD | | | GCAGAATCAAATATAATAGTCT | 1493 | |
| | | DMD | | | AACAAATATCCCTTAGTATC | 1494 | |
| | | DMD | | | AATGTATTTCTTCTATTCAA | 1495 | |
| | | DMD | | | AACAATAAGTCAAATTTAATTG | 1496 | |
| | | DMD | | | GAACTGGTGGGAAATGGTCTAG | 1497 | |
| | | DMD | | | TCCTTTGGTAAATAAAAGTCCT | 1498 | |
| | | DMD | | | TAGGAATCAAATGGACTTGGAT | 1499 | |
| | | DMD | | | TAATTCTTTCTAGAAAGAGCCT | 1500 | |
| | | DMD | | | CTCTTGCATCTTGCACATGTCC | 1501 | |
| | | DMD | | | ACTTAGAGGTCTTCTACATACA | 1502 | |
| | | DMD | | | TCAGAGGTGAGTGGTGAGGGGA | 1503 | |
| | | DMD | | | ACACACAGCTGGGTTATCAGAG | 1504 | |
| | | DMD | | | CACAGCTGGGTTATCAGAG | 1505 | |
| | | DMD | | | ACACAGCTGGGTTATCAGAG | 1506 | |
| | | DMD | | | CACACAGCTGGGTTATCAGAG | 1507 | |
| | | DMD | | | AACACACAGCTGGGTTATCAGAG | 1508 | |
| | | DMD | | | CTGSTGGGARATGGTCTAG | 1509 | |
| | | DMD | | | ACTGGTGGGAAATGGTCTAG | 1510 | |
| | | DMD | | | AACTGGTGGGAAATGGTCTAG | 1511 | |
| | | DMD | | | AGAACTGGTGGGAAATGGTCTAG | 1512 | |
| | | DMD | | | ATATCTTCTTAAATACCCGA | 1513 | |
| | | DMD | | | AGTCTCACAAAACTGCAGAG | 1514 | |
| | | DMD | | | TACTTATGTATTTTAAAAAC | 1515 | |
| | | DMD | | | GAATAATTTCTATTATATTACA | 1516 | |
| | | DMD | | | TTCGAAAATTTCAGGTAAGCCG | 1517 | |
| | | DMD | | | TCATTTCTAAAAGTCTTTTGCC | 1518 | |
| | | DMD | | | TTTGAGACACAGTATAGGTTAT | 1519 | |
| | | DMD | | | ATATAATAGAAATTATTCAT | 1520 | |
| | | DMD | | | TAATATGCCCTGTAATATAA | 1521 | |
| | | DMD | | | TGATATCATCAATATCTTTG | 1522 | |
| | | DMD | | | GCAATTAATTGGAAAATGTG | 1523 | |
| | | DMD | | | CTTTAAGCTTAGGTAAAATCA | 1524 | |
| | | DMD | | | CAGTAATGTGTCATACCTTC | 1525 | |
| | | DMD | | | CAGGGCATATTATATTTAGA | 1526 | |
| | | DMD | | | CAAAAGCCAAATCTATTTCA | 1527 | |
| | | DMD | | | ATGCTTTGGTGGGAAGAAGTAGAGGA | 1528 | |
| | | DMD | | | ATGCTTTGGTGGGAAGAATAGAGGAC | 1529 | |
| | | DMD | | | TTGTGACAAGCTCACTAATTAGG | 1530 | |
| | | DMD | | | AAGTTTGAAGAACTTTTACCAGG | 1531 | |
| | | DMD | | | AGGCAGCGATAAAAAAAACCTGG | 1532 | |
| | | DMD | | | GCTTTGGTGGGAAGAAGTAGAGG | 1533 | |
| | | DMD | | | GCTGGGTGTCCCATTGAAA | 1534 | |
| | | DMD | | | CAGCCGCTCGCTGCAGCAG | 1535 | |
| | | DMD | | | TGGAGAGTTTGCAAGGAGC | 1536 | |
| | | DMD | | | GTTTATTCAGCCGGGAGTC | 1537 | |
| | | DMD | | | CGCCAGGAGGGGTGGGTCTA | 1538 | |
| | | DMD | | | CCTTGGTGAGACTGGTAGA | 1539 | |
| | | DMD | | | GTCTTCAGGTTCTGTTGCT | 1540 | |
| | | DMD | | | ATATTCCTGATTTAAAAGT | 1541 | |
| | | DMD | | | TTAAAAGTCGGCTGGTAGC | 1542 | |
| | | DMD | | | CGGGCCGGGGGCGGGGTCC | 1543 | |
| | | DMD | | | GCCCGAGCCGCGTGTGGAA | 1544 | |
| | | DMD | | | CCTTCATTGCGGCGGGCTG | 1545 | |
| | | DMD | | | CCGACCCCTCCCGGGTCCC | 1546 | |
| | | DMD | | | CAGGACCGCGCTTCCCACG | 1547 | |
| | | DMD | | | TGCACCCTGGGAGCGCGAG | 1548 | |
| | | DMD | | | CCGCACGCACCTGTTCCCA | 1549 | |
| | | DMD | | | AAAACAGCGAGGGAGAAAC | 1550 | |
| | | DMD | | | TTAACTTGATTGTGAAATC | 1551 | |
| | | DMD | | | AAAACAATGCATATTTGCA | 1552 | |
| | | DMD | | | AAAATCCAGTATTTTAATG | 1553 | |
| | | DMD | | | ACCCAGCACTGCAGCCTGG | 1554 | |
| | | DMD | | | AACTTATGCGGCGTTTCCT | 1555 | |
| | | DMD | | | TCACTTTAAAACCACCTCT | 1556 | |
| | | DMD | | | GCATCTTTTTCTCTTTAAT | 1557 | |
| | | DMD | | | TGTACTCTCTGAGGTGCTC | 1558 | |
| | | DMD | | | ACGCAGATAAGAACCAGTT | 1559 | |
| | | DMD | | | CATCAAGTCAGCCATCAGC | 1560 | |
| | | DMD | | | GAGTCACCCTCCTGGAAAC | 1561 | |
| | | DMD | | | GCTAGGGATGAAGAATAAA | 1562 | |
| | | DMD | | | TTGACCAATAGCCTTGACA | 1563 | |
| | | DMD | | | TGCAAATATCTGTCTGAAA | 1564 | |
| | | DMD | | | AAATTAGCAGTATCCTCTT | 1565 | |
| | | DMD | | | CCTGGGCTCCGGGGCGTTT | 1566 | |
| | | DMD | | | GGCCCCTGCGGCCACCCCG | 1567 | |
| | | DMD | | | CTCCCTCCCTGCCCGGTAG | 1568 | |
| | | DMD | | | AGGTTTGGAAAGGGCGTGC | 1569 | |
| | | DMD | | | GATTGGCTTTGATTTCCCTA | 1570 | |
| | | DMD | | | GTGTAGAGTAAGTCAGCCTATGG | 1571 | |
| | | DMD | | | GCCTACTCAGACTGTTACTC | 1572 | |
| | | DMD | | | GTTGGACAGAACTTACCGACTGG | 1573 | |
| | | DMD | | | GCAGTTGCCTAAGAACTGGT | 1574 | |
| | | DMD | | | GGGGCTCCACCCTCACGAGT | 1575 | |
| | | DMD | | | GTTTGCTTCGCTATAAAACGAGG | 1576 | |
| | | DMD | | | GTCTGAGGATGGGGCCGCAATGG | 1577 | |
| | | DMD | | | GGATCTGTCAAATCGCCTGCAGG | 1578 | |
| | | DMD | | | GCCAGGATGGCATTGGGCAGCGG | 1579 | |
| | | DMD | | | GCTGAATCTGCGGTGGCAGGAGG | 1580 | |
| | | DMD | | | GTTCTTTTGTTCTTCTAGCCTGG | 1581 | |
| | | DMD | | | GGAAAAGCTTGAGCAAGTCAAGG | 1582 | |
| | | DMD | | | GGAAGAGTTGCCCCTGCGCCAGG | 1583 | |
| | | DMD | | | GACAAATCTCCAGTGGATAAAGG | 1584 | |
| | | DMD | | | GTGTTTCTCAGGTAAAGCTCTGG | 1585 | |
| | | DMD | | | GGAAGGACCATTTGACGTTAAGG | 1586 | |
| | | DMD | | | GAACTGCTATTTCAGTTTCCTGG | 1587 | |
| | | DMD | | | GCCAGCCACTCAGCCAGTGAAGG | 1588 | |
| | | DMD | | | GGTATGCTTTTCTGTTAAAGAGG | 1589 | |
| | | DMD | | | GCTCCTGGACTGACCACTATTGG | 1590 | |
| | | DMD | | | GGAACAGAGGCGTCCCCAGTTGG | 1591 | |
| | | DMD | | | GGAGGCTAGAACAATCATTACGG | 1592 | |
| | | DMD | | | GACAAGAACACCTTCAGAACCGG | 1593 | |
| | | DMD | | | GGGTTTCTGTGATTTTCTTTTGG | 1594 | |
| | | DMD | | | GGGCCAAAGACCTCCGCCAGTGG | 1595 | |
| | | DMD | | | GTTGGAGAAGCATTCATAAAAGG | 1596 | |
| | | DMD | | | GTCGCTCACTCACCCTGCAAAGG | 1597 | |
| | | DMD | | | GAAAAGAGCTGATGAAACAATGG | 1598 | |
| | | DMD | | | GTACACTTTTCAAAATGCTTTGG | 1599 | |
| | | DMD | | | GGAGATGATCATCAAGCAGAAGG | 1600 | |
| | | DMD | | | GCTTTGAAAGAGCAATAAAATGG | 1601 | |
| | | DMD | | | GCACAAAAGTCAAATCGGAATGG | 1602 | |
| | | DMD | | | GATTTCAATATAAGATTCGGAGG | 1603 | |
| | | DMD | | | GCTTAAGCAATCCCGAACTCTGG | 1604 | |
| | | DMD | | | GCCTTCTTTATCCCCTATCG | 1605 | |
| | | DMD | | | GAGGCCAAACCTCGGCTTACNNGRR | 1606 | |
| | | DMD | | | GTTCGAAAATTTCAGGTAAGNNGRR | 1607 | |
| | | DMD | | | GGCAGAACAGGAGATAACAGNNGRRT | 1608 | |
| | | DMD | | | GGCGGCCCTCGCCCTTCTCTGGGGAT | 1609 | |
| | | DMD | | | GTAGTGATCGTGGATACGAGAGG | 1610 | |
| | | DMD | | | GTACAGCCCTCGGTGTATATTGG | 1611 | |
| | | DMD | | | GGGAAGGAATTAAGCCCGAATGG | 1612 | |
| | | DMD | | | GGGAACAGCTTTCGTAGTTGAGG | 1613 | |
| | | DMD | | | GATAAAGTCCAGTGTCGATCAGG | 1614 | |
| | | DMD | | | GAAAACCAGAGCTTCGGTCAAGG | 1615 | |
| | | DMD | | | GGAGTCTTCTGGGCAGGCTTAAAGGCT | 1616 | |
| | | | | | AACCTGG | | |
| | | DMD | | | GTCGGGTGAGCATGTCTTTAATCTACC | 1617 | |
| | | | | | TCGATGG | | |
| | | DMD | | | GGTGTCACCAGAGTAACAGTCTGAGT | 1618 | |
| | | DMD | | | GTGATCATCAAGCAGAAGGTATGAG | 1619 | |
| | | DMD | | | GAACTTCGAAAATTTCAGGTAAGCCGA | 1620 | |
| | | | | | GG | | |
| | | DMD | | | GGAAACTCATCAAATATGCGTGTTAGT | 1621 | |
| | | | | | GT | | |
| | | DMD | | | GTCATTTACACTAACACGCATATTTGA | 1622 | |
| | | | | | TG | | |
| | | DMD | | | GGAATGAAACTCATCAAATATGCGTGT | 1623 | |
| | | | | | TA | | |
| | | DMD | | | GTCATCAATATCTTTGAAGGACTCTGG | 1624 | |
| | | | | | GT | | |
| | | DMD | | | GTGTTTTCATAGGAAAAATAGGCAAGT | 1625 | |
| | | | | | TG | | |
| | | DMD | | | GAATTGGAAAATGTGATGGGAAACAGA | 1626 | |
| | | | | | TA | | |
| | | DMD | | | GATGATCATCAAGCAGAAGGTATGAGA | 1627 | |
| | | | | | AA | | |
| | | DMD | | | GAGATGATCATCAAGCAGAAGGTATGA | 1628 | |
| | | | | | GA | | |
| | | DMD | | | GCATTTTTTCTCATACCTTCTGCTTGA | 1629 | |
| | | | | | TG | | |
| | | DMD | | | GTCCTACTCAGACTGTTACTCTGGTGA | 1630 | |
| | | | | | CA | | |
| | | DMD | | | GACAGGTTGTGTCACCAGAGTAACAGT | 1631 | |
| | | | | | CT | | |
| | | DMD | | | GTTATCATTTTTTCTCATACCTTCTGC | 1632 | |
| | | | | | TT | | |
| | | DMD | | | GTTGCCTAAGAACTGGTGGGAAATGGT | 1633 | |
| | | | | | CT | | |
| | | DMD | | | GAAACAGTTGCCTAAGAACTGGTGGGA | 1634 | |
| | | | | | AA | | |
| | | DMD | | | GTTTCCCACCAGTTCTTAGGCAACTGT | 1635 | |
| | | | | | TT | | |
| | | DMD | | | GTGGCTTTGATTTCCCTAGGGTCCAGC | 1636 | |
| | | | | | TT | | |
| | | DMD | | | GTAGGGAAATCAAAGCCAATGAAACGT | 1637 | |
| | | | | | TC | | |
| | | DMD | | | GGACCCTAGGGAAATCAAAGCCAATGA | 1638 | |
| | | | | | AA | | |
| | | DMD | | | GTGAGGGCTCCACCCTCACGAGTGGGT | 1639 | |
| | | | | | TT | | |
| | | DMD | | | GAAGGATTGAGGGCTCCACCCTCACGA | 1640 | |
| | | | | | GT | | |
| | | DMD | | | GGCTCCACCCTCACGAGTGGGTTTGGT | 1641 | |
| | | | | | TC | | |
| | | DMD | | | GTATCCCCTATCGAGGAAACCACGAGT | 1642 | |
| | | | | | TT | | |
| | | DMD | | | GGATAAAGAAGGCCTATTTCATAGAGT | 1643 | |
| | | | | | TG | | |
| | | DMD | | | GAGGCCTTCTTTATCCCCTATCGAGGA | 1644 | |
| | | | | | AA | | |
| | | DMD | | | GTGAGGGCTCCACCCTCACGAGTGGGT | 1645 | |
| | | DMD | | | GGATAAAGAAGGCCTATTTCATAGAGT | 1646 | |
| | | DMD | | | CACCGCAGCCGCTCGCTGCAGCAG | 1647 | |
| | | DMD | | | AAACCTGCTGCAGCGAGCGGCTGC | 1648 | |
| | | DMD | | | CACCGGCTGGGTGTCCCATTGAAA | 1649 | |
| | | DMD | | | AAACTTTCAATGGGACACCCAGCC | 1650 | |
| | | DMD | | | CACCGGTTTATTCAGCCGGGAGTC | 1651 | |
| | | DMD | | | AAACGACTCCCGGCTGAATAAACC | 1652 | |
| | | DMD | | | CACCGTGGAGAGTTTGCAAGGAGC | 1653 | |
| | | DMD | | | AAACGCTCCTTGCAAACTCTCCAC | 1654 | |
| | | DMD | | | CACCGCCCTCCAGACTTTCCACCT | 1655 | |
| | | DMD | | | AAACAGGTGGAAAGTCTGGAGGGC | 1656 | |
| | | DMD | | | CACCGAATTTTCTTCCAAGTTCTC | 1657 | |
| | | DMD | | | AAACGAGAACTTGGAAGAAAATTC | 1658 | |
| | | DMD | | | CACCGCTGCGGAGAGAAGAAAGGG | 1659 | |
| | | DMD | | | AAACCCCTTTCTTCTCTCCGCAGC | 1660 | |
| | | DMD | | | CACCGAGAGCCACCCCCTGGCTCC | 1661 | |
| | | DMD | | | AAACGGAGCCAGGGGGTGGCTCTC | 1662 | |
| | | DMD | | | CACCGCGAAGCCAACCGCGGCGGG | 1663 | |
| | | DMD | | | AAACCCCGCCGCGGTTGGCTTCGC | 1664 | |
| | | DMD | | | CACCGAGAGGGAAGACGATCGCCC | 1665 | |
| | | DMD | | | AAACGGGCGATCGTCTTCCCTCTC | 1666 | |
| | | DMD | | | CACCGCCCCTTTAACTTTCCTCCG | 1667 | |
| | | DMD | | | AAACCGGAGGAAAGTTAAAGGGGC | 1668 | |
| | | DMD | | | CACCGGCAGCCCCGCTTCCTTCAA | 1669 | |
| | | DMD | | | AAACTTGAAGGAAGCGGGGCTGCC | 1670 | |
| | | DMD | | | CACCGCGAGAGCGAGAGGAGGGAG | 1671 | |
| | | DMD | | | AAACCTCCCTCCTCTCGCTCTCGC | 1672 | |
| | | DMD | | | CACCGGAGAGAGCTTGAGAGCGCG | 1673 | |
| | | DMD | | | AAACCGCGCTCTCAAGCTCTCTCC | 1674 | |
| | | DMD | | | CACCGGGTGGAGGGGGCGGGGCCC | 1675 | |
| | | DMD | | | AAACGGGCCCCGCCCCCTCCACCC | 1676 | |
| | | DMD | | | CACCGGGTATCCACGTAAATCAAA | 1677 | |
| | | DMD | | | AAACTTTGATTTACGTGGATACCC | 1678 | |
| | | DMD | | | CACCGCCAATCACTGGCTCCGGTC | 1679 | |
| | | DMD | | | AAACGACCGGAGCCAGTGATTGGC | 1680 | |
| | | DMD | | | CACCGGGCGCCCGAGGGAAGAAGA | 1681 | |
| | | DMD | | | AAACTCTTCTTCCCTCGGGCGCCC | 1682 | |
| | | DMD | | | CACCGGGGTGGGGGTACCAGAGGA | 1683 | |
| | | DMD | | | AAACTCCTCTGGTACCCCCACCCC | 1684 | |
| | | DMD | | | CACCGCCGGGGACAGAAGAGAGGG | 1685 | |
| | | DMD | | | AAACCCCTCTCTTCTGTCCCCGGC | 1686 | |
| | | DMD | | | CACCGGAGAGAGAGTGGGAGAAGC | 1687 | |
| | | DMD | | | AAACGCTTCTCCCACTCTCTCTCC | 1688 | |
| | | DMD | | | CACCGAAAGTAACTGTCAAATGCG | 1689 | |
| | | DMD | | | AAACCGCATTTGACAGTTACTTTC | 1690 | |
| | | DMD | | | CACCGTTAACCAGAGCGCCCAGTC | 1691 | |
| | | DMD | | | AAACGACTGGGCGCTCTGGTTAAC | 1692 | |
| | | DMD | | | CACCGCGTCGGAGCTGCCCGCTAG | 1693 | |
| | | DMD | | | AAACCTAGCGGGCAGCTCCGACGC | 1694 | |
| | | DMD | | | TGTACTCTCTGAGGTGCTC | 1695 | |
| | | DMD | | | ACGCAGATAAGAACCAGTT | 1696 | |
| | | DMD | | | CATCAAGTCAGCCATCAGC | 1697 | |
| | | DMD | | | GAGTCACCCTCCTGGAAAC | 1698 | |
| | | DMD | | | CCTGGGCTCCGGGGCGTTT | 1699 | |
| | | DMD | | | GGCCCCTGCGGCCACCCCG | 1700 | |
| | | DMD | | | CTCCCTCCCTGCCCGGTAG | 1701 | |
| | | DMD | | | AGGTTTGGAAAGGGCGTGC | 1702 | |
| | | DMD | | | ACTCCACTGCACTCCAGTCT | 1703 | |
| | | DMD | | | TCTGTGGGGGACCTGCACTG | 1704 | |
| | | DMD | | | GGGGCGCCAGTTGTGTCTCC | 1705 | |
| | | DMD | | | ACACCATTGCCACCACCATT | 1706 | |
| | | DMD | | | CAATGACCCCTTCATTGACC | 1707 | |
| | | DMD | | | TTGATTTTGGAGGGATCTCG | 1708 | |
| | | DMD | | | GGAATCCATGGAGGGAAGAT | 1709 | |
| | | DMD | | | TGTTCTCGCTCAGGTCAGTG | 1710 | |
| | | DMD | | | CTCTCTGCTCCTTTGCCACA | 1711 | |
| | | DMD | | | GTGCTCTTCGGGTTTCAGGA | 1712 | |
| | | DMD | | | CGAAAGAGAAAGCGAACCAGTATCGAG | 1713 | |
| | | | | | AAC | | |
| | | DMD | | | CGTTGTGCATAGTCGCTGCTTGATCGC | 1714 | |
| | | DMD | | | UAGAAGAUCUGAGCUCUGAG | 1715 | |
| | | DMD | | | AGAUCUGAGCUCUGAGUGGA | 1716 | |
| | | DMD | | | UCUGAGCUCUGAGUGGAAGG | 1717 | |
| | | DMD | | | CCGUUUACUUCAAGAGCUGA | 1718 | |
| | | DMD | | | AAGCAGCCUGACCUAGCUCC | 1719 | |
| | | DMD | | | GCUCCUGGACUGACCACUAU | 1720 | |
| | | DMD | | | CCCUCAGCUCUUGAAGUAAA | 1721 | |
| | | DMD | | | GUCAGUCCAGGAGCUAGGUC | 1722 | |
| | | DMD | | | UAGUGGUCAGUCCAGGAGCU | 1723 | |
| | | DMD | | | GCUCCAAUAGUGGUCAGUCC | 1724 | |
| | | DMD | | | UGGCCAAAGACCUCCGCCAG | 1725 | |
| | | DMD | | | GUGGCAGACAAAUGUAGAUG | 1726 | |
| | | DMD | | | UGUAGAUGUGGCAAAUGACU | 1727 | |
| | | DMD | | | CUUGGCCCUCAAACUUCUCC | 1728 | |
| | | DMD | | | CAGAGAAUAUCAAUGCCUCU | 1729 | |
| | | DMD | | | CAGAGAAUAUCAAUGCCUCU | 1730 | |
| | | DMD | | | CAUUUGUCUGCCACUGGCGG | 1731 | |
| | | DMD | | | CUACAUUUGUCUGCCACUGG | 1732 | |
| | | DMD | | | CAUCUACAUUUGUCUGCCAC | 1733 | |
| | | DMD | | | AUAAUCCCGGAGAAGUUUCA | 1734 | |
| | | DMD | | | UAUCAUCUGCAGAAUAAUCC | 1735 | |
| | | DMD | | | UGUUAUCAUGUGGACUUUUC | 1736 | |
| | | DMD | | | UGAUAUAUCAUUUCUCUGUG | 1737 | |
| | | DMD | | | UUUAUGAAUGCUUCUCCAAG | 1738 | |
| | | DMD | | | UUCUCCAGGCUAGAAGAACAA | 1739 | |
| | | DMD | | | CUGCUCUUUUCCAGGUUCAAG | 1740 | |
| | | DMD | | | GUCUGUUUCAGUUACUGGUGG | 1741 | |
| | | DMD | | | UCCAGUUUCAUUUAAUUGUUU | 1742 | |
| | | DMD | | | CUUAUGGGAGCACUUACAAGC | 1743 | |
| | | DMD | | | UUGCUUCAUUACCUUCACUGG | 1744 | |
| | | DMD | | | UUGUGUCACCAGAGUAACAGU | 1745 | |
| | | DMD | | | AGUAACCACAGGUUGUGUCAC | 1746 | |
| | | DMD | | | UUCAAAUUUUGGGCAGCGGUA | 1747 | |
| | | DMD | | | CAAGAGGCUAGAACAAUCAUU | 1748 | |
| | | DMD | | | UUGUACUUCAUCCCACUGAUU | 1749 | |
| | | DMD | | | CUUCAGAACCGGAGGCAACAG | 1750 | |
| | | DMD | | | CAACAGUUGAAUGAAAUGUUA | 1751 | |
| | | DMD | | | GCCAAGCUUGAGUCAUGGAAG | 1752 | |
| | | DMD | | | CUUGGUUUCUGUGAUUUUCUU | 1753 | |
| | | DMD | | | UCAUUUCACAGGCCUUCAAGA | 1754 | |
| | | DMD | | | CAGAAAUAUUCGUACAGUCUC | 1755 | |
| | | DMD | | | CAAUUACCUCUGGGCUCCUGG | 1756 | |
| | | DMD | | | GAACUUCUAUUUAAUUUUG | 1757 | |
| | | DMD | | | AUUUCAGGUAAGCCGAGGUU | 1758 | |
| | | DMD | | | UCUUAAUAAUGUUUCACUGU | 1759 | |
| | | DMD | | | AUAAUUUCUAUUAUAUUACA | 1760 | |
| | | DMD | | | UUUCAUUCAUAUCAAGAAGA | 1761 | |
| | | DMD | | | AUAGUUUAAAGGCCAAACCU | 1762 | |
| | | DMD | | | UGUGAAAAAAUAUAGUUUAA | 1763 | |
| | | DMD | | | CGAAAAUUUCAGGUAAGCCG | 1764 | |
| | | DMD | | | CAAAAACCCAAAATATTTTAGCT | 1765 | |
| | | DMD | | | CCTTTTTGGTATCTTACAGGAAC | 1766 | |
| | | DMD | | | CCGCTGCCCAATGCCATCCTGGA | 1767 | |
| | | DMD | | | TTTTTCCTTTTATTCTAGTTGAA | 1768 | |
| | | DMD | | | TTGATCCATATGCTTTTACCTGC | 1769 | |
| | | DMD | | | TCAACAGATCTGTCAAATCGCCT | 1770 | |
| | | DMD | | | TTCTTCTTTCTCCAGGCTAGAAG | 1771 | |
| | | DMD | | | GTTCTTCTAGCCTGGAGAAAGAA | 1772 | |
| | | DMD | | | CAAATCCTGCATTGTTGCCTGTA | 1773 | |
| | | DMD | | | CTGTTAAAGAGGAAGTTAGAAGA | 1774 | |
| | | DMD | | | AAAATTTTTATATTACAGAATAT | 1775 | |
| | | DMD | | | TTGTAGACTATCTTTTATATTCT | 1776 | |
| | | DMD | | | TTTTGCATTTTAGATGAAAGAGA | 1777 | |
| | | DMD | | | AACATCTTCTCTTTCATCTAAAA | 1778 | |
| | | DMD | | | TTTTGAACATCTTCTCTTTCATC | 1779 | |
| | | DMD | | | CAAAAACCCAAAATATTTTAGCT | 1780 | |
| | | DMD | | | GCTTGTGTTTCTAATTTTTCTTT | 1781 | |
| | | DMD | | | ACTTATTGTTATTGAAATTGGCT | 1782 | |
| | | DMD | | | TACCATGTATTGCTAAACAAAGT | 1783 | |
| | | DMD | | | GTATCAATTCACACCAGCAAGTT | 1784 | |
| | | DMD | | | CTCCTCTGTAAAGTGGCGATTAT | 1785 | |
| | | DMD | | | TTTAAAATGAAGATTTTCCACCA | 1786 | |
| | | DMD | | | AAATGAAGATTTTCCACCAATCA | 1787 | |
| | | DMD | | | CCACCAATCACTTTACTCTCCTA | 1788 | |
| | | DMD | | | CCACCAGTTCTTAGGCAACTGTT | 1789 | |
| | | DMD | | | CATTAATTTATATCCTTGATTAT | 1790 | |
| | | DMD | | | GTTGTTGTTGTTAAGGTCAAAGT | 1791 | |
| | | DMD | | | AAATTACCCTAGATCTTAAAGTT | 1792 | |
| | | DMD | | | GCCTCTGATTAGGGTGGGGGCGTG | 1793 | |
| | | DMD | | | TCACAGGCTCCAGGAAGGGTTTGG | 1794 | |
| | | DMD | | | CCCAGGGGGGCCTCTTTCGGAAGG | 1795 | |
| | | DMD | | | GGAAGGCTCTCTTGGTGATGGAGA | 1796 | |
| | | DMD | | | AAGCTAGTCTAGTGCAAGCTAACA | 1797 | |
| | | DMD | | | CTGGCCTATGTTATTACCTGTATG | 1798 | |
| | | DMD | | | TGGCCTATGTTATTACCTGTATGG | 1799 | |
| | | DMD | | | TTCCATTCTAATGGGTGGCTGTT | 1800 | |
| | | DMD | | | CTCCTCTGTAAAGTGGCGAT | 1801 | |
| | | DMD | | | TTCCATTCTAATGGGTGGCT | 1802 | |
| | | DMD | | | GTATCAATTCACACCAGCAA | 1803 | |
| | | DMD | | | TACCATGTATTGCTAAACAA | 1804 | |
| | | DMD | | | ACTTATTGTTATTGAAATTG | 1805 | |
| | | DMD | | | GCTTGTGTTTCTAATTTTTC | 1806 | |
| | | DMD | | | CAAAAACCCAAAATATTTTA | 1807 | |
| | | DMD | | | TTTAAAATGAAGATTTTCCA | 1808 | |
| | | DMD | | | AAATGAAGATTTTCCACCAA | 1809 | |
| | | DMD | | | CCACCAATCACTTTACTCTC | 1810 | |
| | | DMD | | | CCACCAGTTCTTAGGCAACT | 1811 | |
| | | DMD | | | CATTAATTTATATCCTTGAT | 1812 | |
| | | DMD | | | AGTTATAGCTCTCTTTCAAT | 1813 | |
| | | DMD | | | ATGTATAACAATTCCAACAT | 1814 | |
| | | DMD | | | AAATTACCCTAGATCTTAAA | 1815 | |
| | | DMD | | | GTTGTTGTTGTTAAGGTCAA | 1816 | |
| | | DMD | | | GCTTGTGTTTCTAATTTTTC | 1817 | |
| | | DMD | | | TAATTTTTCTTTTTCTTCTT | 1818 | |
| | | DMD | | | GCAAAAAGGAAAAAAGAAGA | 1819 | |
| | | DMD | | | GGGTTTTTGCAAAAAGGAAA | 1820 | |
| | | DMD | | | AGCTCCTACTCAGACTGTTA | 1821 | |
| | | DMD | | | TGCAAAAACCCAAAATATTT | 1822 | |
| | | DMD | | | TGTCACCAGAGTAACAGTCT | 1823 | |
| | | DMD | | | CTTAGTAACCACAGGTTGTG | 1824 | |
| | | DMD | | | TAGTTTGGAGATGGCAGTTT | 1825 | |
| | | DMD | | | GAGATGGCAGTTTCCTTAGT | 1826 | |
| | | DMD | | | CTTGATGTTGGAGGTACCTG | 1827 | |
| | | DMD | | | ATGTTGGAGGTACCTGCTCT | 1828 | |
| | | DMD | | | TAACTTGATCAAGCAGAGAA | 1829 | |
| | | DMD | | | TCTGCTTGATCAAGTTATAA | 1830 | |
| | | DMD | | | TAAAATCACAGAGGGTGATG | 1831 | |
| | | DMD | | | ATATCCTCAAGGTCACCCAC | 1832 | |
| | | DMD | | | ATGATCATCTCGTTGATATC | 1833 | |
| | | DMD | | | TCATACCTTCTGCTTGATGA | 1834 | |
| | | DMD | | | TCATTTTTTCTCATACCTTC | 1835 | |
| | | DMD | | | TGCCAACTTTTATCATTTTT | 1836 | |
| | | DMD | | | AATCAGAAAGAAGATCTTAT | 1837 | |
| | | DMD | | | ATTTCCCTAGGGTCCAGCTT | 1838 | |
| | | DMD | | | GCTCAAATTGTTACTCTTCA | 1839 | |
| | | DMD | | | AGCTCCTACTCAGACTGTTA | 1840 | |
| | | DMD | | | ATTCTAGTACTATGCATCTT | 1841 | |
| | | DMD | | | ACTTAAGTTACTTGTCCAGG | 1842 | |
| | | DMD | | | CCAAGGTCCCAGAGTTCCTA | 1843 | |
| | | DMD | | | TTTCCCTGGCAAGGTCTGAA | 1844 | |
| | | DMD | | | GCTCATTCTCATGCCTGGAC | 1845 | |
| | | DMD | | | TTTAGCAATACATGGTAGAA | 1846 | |
| | | DMD | | | AGCCAAACTCTTATTCATGA | 1847 | |
| | | DMD | | | TAACAATGTGGATACTTTGT | 1848 | |
| | | DMD | | | GUGUUAUUACUUGCUACUGCA | 1849 | |
| | | DMD | | | GUGUAUUGCUUGUACUACUCA | 1850 | |
| | | DMD | | | GUUUAAAUGUAAAUAGCUCAG | 1851 | |
| | | DMD | | | GAAUUUUCAAUGAUGUUCUGGG | 1852 | |
| | | DMD | | | GAACUGGUGGGAAAUGGUCUAG | 1853 | |
| | | DMD | | | GUUUCAUUGGCUUUGAUUUCCC | 1854 | |
| | | DMD | | | GGCAAUUCUCCUGAAUAGAAA | 1855 | |
| | | DMD | | | GAUUAUACUUAGGCUGAAUAGU | 1856 | |
| | | DMD | | | GACUUCCAGAAUUAUGUGUUC | 1857 | |
| | | DMD | | | GUGAGGGCCUGACACAUGGUA | 1858 | |
| | | DMD | | | GUGAAGAUCAUUUCUUGGUAG | 1859 | |
| | | DMD | | | GCACAGUCAGAACUAGUGUGC | 1860 | |
| | | DMD | | | GAGUAAGCCCGAUCAUUAUUG | 1861 | |
| | | DMD | | | GGAAGGGACAUAUUCUAUGGG | 1862 | |
| | | DMD | | | GACCACAAGCUGACUUGGGGG | 1863 | |
| | | DMD | | | GGAUUUGUAUCCAUUAUCUGG | 1864 | |
| | | DMD | | | CUCUGCAUUGUUUUGGCCUC | 1865 | |
| | | DMD | | | UCCUCCAAAGAGUAGAAUGG | 1866 | |
| | | DMD | | | GCCCUAAACUUACACUGUUC | 1867 | |
| | | DMD | | | AAAGAUAGAUUAGAUUGUCC | 1868 | |
| | | DMD | | | GUUGCUAAAUUACAUAGUUU | 1869 | |
| | | DMD | | | UGUUGCAAUAGUCAAUCAAG | 1870 | |
| | | DMD | | | AUACUGAUUAAGACAGAUGA | 1871 | |
| | | DMD | | | AAUACUGAUUAAGACAGAUG | 1872 | |
| | | DMD | | | CUCUAUACAAAUGCCAACGC | 1873 | |
| | | DMD | | | ACUUGCAUGCACACCAGCGU | 1874 | |
| | | DMD | | | UUGGGCUAAUGUAGCAUAAU | 1875 | |
| | | DMD | | | GCGUUGGCAUUUGUAUAGAG | 1876 | |
| | | DMD | | | UGGGCUAAGUAGCAUAAUG | 1877 | |
| | | DMD | | | UUUGGGCUAAUGUAGCAUAA | 1878 | |
| | | DMD | | | GCUUAACUCCUUAAUAUUAA | 1879 | |
| | | DMD | | | UCUUCUAUAUUAAAGCAGAU | 1880 | |
| | | DMD | | | CUUCUAUAUUAAAGCAGAUU | 1881 | |
| | | DMD | | | AAUAUAUAACUACCUUGGGU | 1882 | |
| | | DMD | | | ACCUCCAUUCUACUCUUUGG | 1883 | |
| | | DMD | | | UUUCAAUGAUAUCCAACCCA | 1884 | |
| | | DMD | | | AGUACCUCCAUUCUACUCUU | 1885 | |
| | | DMD | | | CUAUCCUCCATAGAGUAGAA | 1886 | |
| | | DMD | | | UUUUGCUACAUAUUUCAGGC | 1887 | |
| | | DMD | | | UUUGCUACAUAUUUCAGGCU | 1888 | |
| | | DMD | | | GGGUUGGAUAUCAUUGAAAA | 1889 | |
| | | DMD | | | AUAUUUCAGGCUGGGUUCU | 1890 | |
| | | DMD | | | UUGAAAUAUAUAACUACCUU | 1891 | |
| | | DMD | | | AUUGAAAUAUAUAACUACCU | 1892 | |
| | | DMD | | | GUGAGUAGUGGGGCACUUUA | 1893 | |
| | | DMD | | | UGUAUGUAGAAGGUUAACUA | 1894 | |
| | | DMD | | | GAGCCUAAUAAAUGUACAAU | 1895 | |
| | | DMD | | | UUGUAUGUAGAAGGUUAACU | 1896 | |
| | | DMD | | | CAAUUUGUUUUGAGUAACU | 1897 | |
| | | DMD | | | UGCCUUCUGAAAUAGUCCAG | 1898 | |
| | | DMD | | | GUUAAUAGGGAAACAGCAUA | 1899 | |
| | | DMD | | | AACAAUGCAGAGUUAAUUGU | 1900 | |
| | | DMD | | | GAACAUGUUGAGUAGACACA | 1901 | |
| | | DMD | | | UUUAUCAUCUGUGUCUAUUC | 1902 | |
| | | DMD | | | UCUUUACUUUCUUGACUAUA | 1903 | |
| | | DMD | | | AAUAUUCUCAAACCUCGUUC | 1904 | |
| | | DMD | | | AUUAACUGUGUUCCAGAACG | 1905 | |
| | | DMD | | | UAACUGCUUCUUUGGAUGAC | 1906 | |
| | | DMD | | | GACCAGAACAGUGUAAGUUU | 1907 | |
| | | DMD | | | ACCAGAACAGUGUAAGUUUA | 1908 | |
| | | DMD | | | CUACUUUUUCCCCACUACUG | 1909 | |
| | | DMD | | | UGGAACACAGUUAAUUCACU | 1910 | |
| | | DMD | | | GUGUUGUUUAACUGCUUCUU | 1911 | |
| | | DMD | | | AACUGUCAGUUGCAUAUUCC | 1912 | |
| | | DMD | | | CAGAAAGGAAUGCUGGUACC | 1913 | |
| | | DMD | | | UCUGCCUACACAAUGAAUGG | 1914 | |
| | | DMD | | | CACAGAUCAAUCCAAUUGUU | 1915 | |
| | | DMD | | | UUGACAGGUGGAAAGUACAU | 1916 | |
| | | DMD | | | ACAUUUUUAGGCUUGACAGG | 1917 | |
| | | DMD | | | CUCUCCCAUGACAGACUCCC | 1918 | |
| | | DMD | | | UUGGUAAGAGUUAUGAUAAG | 1919 | |
| | | DMD | | | AACACAAAUUAAGUUCACCU | 1920 | |
| | | DMD | | | AGGAUCAGUGCUGUAGUGCC | 1921 | |
| | | DMD | | | GGCCGUUUAUUAUUAUUGAC | 1922 | |
| | | DMD | | | UCUCAGGAUUGCUAUGCAAC | 1923 | |
| | | DMD | | | CAGGAAGACAUACCAUGUAA | 1924 | |
| | | DMD | | | AGCAGGGCUCUUUCAGUUUC | 1925 | |
| | | DMD | | | UAACAUUUUCAGCUUGAACC | 1926 | |
| | | DMD | | | UCAAGCUGAAAAUGUUACAC | 1927 | |
| | | DMD | | | GUAACAUUUUCAGCUUGAAC | 1928 | |
| | | DMD | | | CAGAAUGAAUUUUGGAGCAC | 1929 | |
| | | DMD | | | UUUAUUAUUAUUGACUGGUG | 1930 | |
| | | DMD | | | AGAAGAAUCUGACCUUUACA | 1931 | |
| | | DMD | | | GCAGGGCUCUUUCAGUUUCU | 1932 | |
| | | DMD | | | CUAAACAGUAGCCAGGCGUG | 1933 | |
| | | DMD | | | CGCCUGGCUACUGUUUAGUG | 1934 | |
| | | DMD | | | CUCCGCACUAAACAGUAGCC | 1935 | |
| | | DMD | | | GUAGCCAGGCGUGUGGAUGU | 1936 | |
| | | DMD | | | CUUGGCUUUGACUAUUCUGC | 1937 | |
| | | DMD | | | AGUAGCCAGGCGUGUGGAUG | 1938 | |
| | | DMD | | | UCCUCCCACAUCCACACGCC | 1939 | |
| | | DMD | | | UUGGCUUUGACUAUUCUGCU | 1940 | |
| | | DMD | | | AUAAUGUCUCUGGCUUGUAA | 1941 | |
| | | DMD | | | UGGUACCCGGCAGCUCUCUG | 1942 | |
| | | DMD | | | GUGGGAGGAACCUCAAAGAG | 1943 | |
| | | DMD | | | UGACUAUUCUGCUGGGAACA | 1944 | |
| | | DMD | | | CUCUCUGAGGAAUGUUCCCU | 1945 | |
| | | DMD | | | AACAUUCCUCAGAGAGCUGC | 1946 | |
| | | DMD | | | AUUCUGAAGCUCCAAACAAU | 1947 | |
| | | DMD | | | UAAAUUACUCUGCUAAAGUA | 1948 | |
| | | DMD | | | AGUACAAACCAGGUUUGUAC | 1949 | |
| | | DMD | | | AUAUCCUUCCAGUACAAACC | 1950 | |
| | | DMD | | | CAAACCAGGUUUGUACUGGA | 1951 | |
| | | DMD | | | GGCAGCUAAAGCAUCACUGA | 1952 | |
| | | DMD | | | AUGUCUGAGUAGUACAAACC | 1953 | |
| | | DMD | | | GUGUCCCAUUCUCUUUGACU | 1954 | |
| | | DMD | | | UGUGUCCCAUUCUCUUUGAC | 1955 | |
| | | DMD | | | UUCUGAAUGUUGAACAAGUA | 1956 | |
| | | DMD | | | GUCUCCCAGUCAAAGAGAAU | 1957 | |
| | | DMD | | | AUUCUCUUUGACUGGGAGAC | 1958 | |
| | | DMD | | | UCUUUGACUGGGAGACAGGC | 1959 | |
| | | DMD | | | GUGGUGUCCUUUGAAUAUGC | 1960 | |
| | | DMD | | | AGAUUGUCCAGGAUAUAAUU | 1961 | |
| | | DMD | | | UUAGCAACCAAAUUAUAUCC | 1962 | |
| | | DMD | | | GUUGAAAUUAAACUACACAC | 1963 | |
| | | DMD | | | AUCUUUACCUGCAUAUUCAA | 1964 | |
| | | DMD | | | GUGUCCUUUGAAUAUGC | 1965 | |
| | | DMD | | | UUGUCCAGGAUAUAAUU | 1966 | |
| | | DMD | | | GCAACCAAAUUAUAUCC | 1967 | |
| | | DMD | | | GAAAUUAAACUACACAC | 1968 | |
| | | DMD | | | UUUACCUGCAUAUUCAA | 1969 | |
| | | DMD | | | UACACAUUUUUAGGCUUGAC | 1970 | |
| | | DMD | | | CAUUCCUGGGAGUCUGUCAU | 1971 | |
| | | DMD | | | UGUAUGAUGCUAUAAUACCA | 1972 | |
| | | DMD | | | GUGGAAAGUACAUAGGACCU | 1973 | |
| | | DMD | | | UCUUAUCAUAACUCUUACCA | 1974 | |
| | | DMD | | | ACAUUUUUAGGCUUGAC | 1975 | |
| | | DMD | | | UCCUGGGAGUCUGUCAU | 1976 | |
| | | DMD | | | AUGAUGCUAUAAUACCA | 1977 | |
| | | DMD | | | GAAAGUACAUAGGACCU | 1978 | |
| | | DMD | | | UAUCAUAACUCUUACCA | 1979 | |
| | | DMD | | | GAGTTCCTACTCAGACTGTTACTC | 1980 | |
| | | DMD | | | GTGAGTTCCTACTCAGACTGTTACTC | 1981 | |
| | | DMD | | | GTCTGAGTTCCTACTCAGACTGTTACT | 1982 | |
| | | | | | C | | |
| | | DMD | | | AAAGATATATAATGTCATGAAT | 1983 | |
| | | DMD | | | GCAGAATCAAATATAATAGTCT | 1984 | |
| | | DMD | | | AACAAATATCCCTTAGTATC | 1985 | |
| | | DMD | | | AATGTATTTCTTCTATTCAA | 1986 | |
| | | DMD | | | AACAATAAGTCAAATTTAATTG | 1987 | |
| | | DMD | | | GAACTGGTGGGAAATGGTCTAG | 1988 | |
| | | DMD | | | TCCTTTGGTAAATAAAAGTCCT | 1989 | |
| | | DMD | | | TAGGAATCAAATGGACTTGGAT | 1990 | |
| | | DMD | | | TAATTCTTTCTAGAAAGAGCCT | 1991 | |
| | | DMD | | | CTCTTGCATCTTGCACATGTCC | 1992 | |
| | | DMD | | | ACTTAGAGGTCTTCTACATACA | 1993 | |
| | | DMD | | | TCAGAGGTGAGTGGTGAGGGGA | 1994 | |
| | | DMD | | | ACACACAGCTGGGTTATCAGAG | 1995 | |
| | | DMD | | | CACAGCTGGGTTATCAGAG | 1996 | |
| | | DMD | | | ACACAGCTGGGTTATCAGAG | 1997 | |
| | | DMD | | | CACACAGCTGGGTTATCAGAG | 1998 | |
| | | DMD | | | AACACACAGCTGGGTTATCAGAG | 1999 | |
| | | DMD | | | CTGSTGGGARATGGTCTAG | 2000 | |
| | | DMD | | | ACTGGTGGGAAATGGTCTAG | 2001 | |
| | | DMD | | | AACTGGTGGGAAATGGTCTAG | 2002 | |
| | | DMD | | | AGAACTGGTGGGAAATGGTCTAG | 2003 | |
| | | DMD | | | ATATCTTCTTAAATACCCGA | 2004 | |
| | | DMD | | | AGTCTCACAAAACTGCAGAG | 2005 | |
| | | DMD | | | TACTTATGTATTTTAAAAAC | 2006 | |
| | | DMD | | | GAATAATTTCTATTATATTACA | 2007 | |
| | | DMD | | | TTCGAAAATTTCAGGTAAGCCG | 2008 | |
| | | DMD | | | TCATTTCTAAAAGTCTTTTGCC | 2009 | |
| | | DMD | | | TTTGAGACACAGTATAGGTTAT | 2010 | |
| | | DMD | | | ATATAATAGAAATTATTCAT | 2011 | |
| | | DMD | | | TAATATGCCCTGTAATATAA | 2012 | |
| | | DMD | | | TGATATCATCAATATCTTTG | 2013 | |
| | | DMD | | | GCAATTAATTGGAAAATGTG | 2014 | |
| | | DMD | | | CTTTAAGCTTAGGTAAAATCA | 2015 | |
| | | DMD | | | CAGTAATGTGTCATACCTTC | 2016 | |
| | | DMD | | | CAGGGCATATTATATTTAGA | 2017 | |
| | | DMD | | | CAAAAGCCAAATCTATTTCA | 2018 | |
| | | DMD | | | ATGCTTTGGTGGGAAGAAGTAGAGGA | 2019 | |
| | | DMD | | | ATGCTTTGGTGGGAAGAATAGAGGAC | 2020 | |
| | | DMD | | | TTGTGACAAGCTCACTAATTAGG | 2021 | |
| | | DMD | | | AAGTTTGAAGAACTTTTACCAGG | 2022 | |
| | | DMD | | | AGGCAGCGATAAAAAAAACCTGG | 2023 | |
| | | DMD | | | GCTTTGGTGGGAAGAAGTAGAGG | 2024 | |

### Scaffold

[0070] The scaffold sequence is the sequence within the gRNA that is responsible for nuclease (e.g., Cas9) binding. The scaffold sequence does not include the spacer/targeting sequence.

[0071] In some embodiments, the scaffold may be about 60 to about 70, about 70 to about 80, about 80 to about 90, about 90 to about 100, about 100 to about 110, about 110 to about 120, or about 120 to about 130 nucleotides in length. In some embodiments, the scaffold may be about 60, about 61, about 62, about 63, about 64, about 65, about 66, about 67, about 68, about 69, about 70, about 71, about 72, about 73, about 74, about 75, about 76, about 77, about 78, about 79, about 80, about 81, about 82, about 83, about 84, about 85, about 86, about 87, about 88, about 89, about 90, about 91, about 92, about 93, about 94, about 95, about 96, about 97, about 98, about 99, about 100, about 101, about 102, about 103, about 104, about 105, about 106, about 107, about 108, about 109, about 110, about 111, about 112, about 113, about 114, about 115, about 116, about 117, about 118, about 119, about 120, about 121, about 122, about 123, about 124, or about 125 nucleotides in length. In some embodiments, the scaffold may be at least 60, at least 70, at least 80, at least 90, at least 100, at least 110, at least 120, or at least 125 nucleotides in length. In some embodiments, the scaffold may be 60, 61, 62, 63, 64, 65, 66, 67, 68, 69, 70, 71, 72, 73, 74, 75, 76, 77, 78, 79, 80, 81, 82, 83, 84, 85, 86, 87, 88, 89, 90, 91, 92, 93, 94, 95, 96, 97, 98, 99, 100, 101, 102, 103, 104, 105, 106, 107, 108, 109, 110, 111, 112, 113, 114, 115, 116, 117, 118, 119, 120, 121, 122, 123, 124, or 125 nucleotides in length.

[0072] In some embodiments, the scaffold may have a sequence of any one of SEQ ID NO: 2357-2362 or 2348 (shown in Table 16 below), or a sequence that is at least 90%, at least 95%, at least 96%, at least 97%, at least 98%, or at least 99% identical thereto.

TABLE 16
Exemplary Scaffold Sequences

| | SEQ ID |
|---|---|
| Sequence | NO: |
| GTTTAAGAGCTATGCTGGAAACAGCATAGCAAGTTTAAATAAGGCTAGTCCGTTATCA | 2348 |
| ACTTGAAAAAGTGGCACCGAGTCGGTGCTTTTTTT | |
| GTTTTAGAGCTAGAAATAGCAGTTAAAATAAGGCTAGTCCGTTATCAACTTGAAAAAG | 2357 |
| TGGCACCGAGTCGGTG | |
| GTTGGAACCATTCAAAACAGCATAGCAAGTTAAAATAAGGCTAGTCCGTTATCAACTT | 2358 |
| GAAAAAGTGGCACCGAGTCGGTGCTTTTTT | |
| GTTTAAGAGCTATGAAACAGCATAGCAAGTTTAAATAAGGCTAGTCCGTTATCAACTT | 2359 |
| GAAAAAGTGGCACCGAGTCGGTGCTTTTTTT | |
| GTTTAAGAGCTATGCGAAACAGCATAGCAAGTTTAAATAAGGCTAGTCCGTTATCAAC | 2360 |
| TTGAAAAAGTGGCACCGAGTCGGTGCTTTTTTT | |
| GTTTAAGAGCTATGCTGTTTGAAACAGCATAGCAAGTTTAAATAAGGCTAGTCCGTTA | 2361 |
| TCAACTTGAAAAAGTGGCACCGAGTCGGTGCTTTTTTT | |
| GTTTAAGAGCTATGCTGTTTTGGAAACAGCATAGCAAGTTTAAATAAGGCTAGTCCGT | 2362 |
| TATCAACTTGAAAAAGTGGCACCGAGTCGGTGCTTTTTTT | |

[0073] In some embodiments, the scaffold sequence is selected from any one of SEQ ID NO: 2357-2362 or 2348.

[0074] In some embodiments, a gRNA (spacer+scaffold) comprises a scaffold and a spacer as shown in Table 17, wherein “X” indicates that the particular combination is contemplated by the instant disclosure.

TABLE 17
Exemplary sgRNA (spacer + scaffold) sequences

| | Scaffold | Scaffold | Scaffold | Scaffold | Scaffold | Scaffold | Scaffold |
|---|---|---|---|---|---|---|---|
| | sequence | sequence | sequence | sequence | sequence | sequence | sequence |
| Spacer | (SEQ ID NO: | (SEQ ID NO: | (SEQ ID NO: | (SEQ ID NO: | (SEQ ID NO: | (SEQ ID NO: | (SEQ ID NO: |
| Sequence | 2348) | 2357) | 2358) | 2359) | 2360) | 2361) | 2362) |
| Any DMD | X | X | X | X | X | X | X |
| Spacer of | | | | | | | |
| the | | | | | | | |
| disclosure | | | | | | | |
| Any one of | X | X | X | X | X | X | X |
| DMD | | | | | | | |
| Spacers | | | | | | | |
| SEQ ID | | | | | | | |
| NOs: 13, 29- | | | | | | | |
| 2024 | | | | | | | |
| DMD | X | X | X | X | X | X | X |
| Spacer SEQ | | | | | | | |
| ID NO: 13 | | | | | | | |
| DMD | X | X | X | X | X | X | X |
| Spacer SEQ | | | | | | | |
| ID NO: 929 | | | | | | | |

### Expression Control Sequences

[0075] The AAV expression cassettes of the disclosure may comprise one or more expression control sequences. Typically, expression control sequences are nucleic acid sequence(s) that influence expression of an operably linked polynucleotide, such as a promoter, an enhancer, a splicing signal, etc. Such elements typically act in cis but may also act in trans. Expression control sequences may be constitutive or inducible.

[0076] Exemplary promoters which may be used in the AAV expression cassettes of the disclosure include naturally occurring and synthetic promoters. In some embodiments, the promoter is selected from any one of the following promoters, or derivatives thereof: Chicken beta actin (CBA) promoter, cytomegalovirus immediate early (CMV) promoter, ubiquitin C (UBC) promoter, elongation factor 1-alpha promoter (EF1-alpha) promoter, a phosphoglycerate kinase-1 promoter (PGK) promoter, a chimeric liver-specific promoter (LSP), a cytomegalovirus enhancer/chicken beta-actin promoter (CAG), a tetracycline responsive promoter (TRE), a transthyretin promoter (TTR), a simian virus 40 promoter (SV40) and a CK6 promoter.

[0077] In some embodiments, the promoter is the U6 promoter, which has the sequence shown below (SEQ ID NO: 15), or a sequence at least 95% or at least 99% identical thereto:

| | |
|---|---|
| 1 | CGAGTCCAAC ACCCGTGGGA ATCCCATGGG CACCATGGCC |
| | CCTCGCTCCA AAAATGCTTT |
| 61 | CGCGTCGCGC AGACACTGCT CGGTAGTTTC GGGGATCAGC |
| | GTTTGAGTAA GAGCCCGCGT |
| 121 | CTGAACCCTC CGCGCCGCCC CGGCCCCAGT GGAAAGACGC |
| | GCAGGCAAAA CGCACCACGT |
| 181 | GACGGAGCGT GACCGCGCGC CGAGCGCGCG CCAAGGTCGG |
| | GCAGGAAGAG GGCCTATTTC |
| 241 | CCATGATTCC TTCATATTTG CATATACGAT ACAAGGCTGT |
| | TAGAGAGATA ATTAGAATTA |
| 301 | ATTTGACTGT AAACACAAAG ATATTAGTAC AAAATACGTG |
| | ACGTAGAAAG TAATAATTTC |
| 361 | TTGGGTAGTT TGCAGTTTTA AAATTATGTT TTAAAATGGA |
| | CTATCATATG CTTACCGTAA |
| 421 | CTTGAAAGTA TTTCGATTTC TTGGCTTTAT ATATCTTGTG |
| | GAAAGGACGA AA |

[0078] In some embodiments, the promoter is the H1 promoter, which has the sequence shown below (SEQ ID NO: 16), or a sequence at least 95% or at least 99% identical thereto:

| | |
|---|---|
| 1 | CTTCGGCGCG CCCATATTTG CATGTCGCTA TGTGTTCTGG |
| | GAAATCACCA TAAACGTGAA |
| 61 | ATGTCTTTGG ATTTGGGAAT CTTATAAGTT CTGTATGAGA |
| | CCACGGTA |

[0079] In some embodiments, the promoter is the 7SK promoter, which has the sequence shown below (SEQ ID NO: 17), or a sequence at least 95% or at least 99% identical thereto:

| | |
|---|---|
| 1 | TGACGGCGCG CCCTGCAGTA TTTAGCATGC CCCACCCATC |
| | TGCAAGGCAT TCTGGATAGT |
| 61 | GTCAAAACAG CCGGAAATCA AGTCCGTTTA TCTCAAACTT |
| | TAGCATTTTG GGAATAAATG |
| 121 | ATATTTGCTA TGCTGGTTAA ATTAGATTTT AGTTAAATTT |
| | CCTGCTGAAG CTCTAGTACG |
| 181 | ATAAGTAACT TGACCTAAGT GTAAAGTTGA GATTTCCTTC |
| | AGGTTTATAT AGCTTGTGCG |
| 241 | CCGCCTGGGT A |

[0080] In some embodiments, the naturally-occurring or synthetic promoter may be a tissue-specific promoter. The tissue-specific promoter may be specific, for example, to the liver, brain, central nervous system, spinal cord, eye, retina, bone, muscle (including cardiac, skeletal, and and/or smooth muscle), lung, pancreas, heart, kidney, etc.

[0081] In some embodiments, the promoter is muscle-specific. The muscle-specific promoter may be for example, a myosin light chain (MLC) promoter, for example MLC2 (Gene ID No. 4633; representative GenBank Accession No. NG_007554.1); a myosin heavy chain (MHC) promoter, for example alpha-MHC (Gene ID No. 4624; representative GenBank Accession No. NG_023444.1); a desmin promoter (Gene ID No. 1674; representative GenBank Accession No. NG_008043.1); a cardiac troponin C promoter (Gene ID No. 7134; representative GenBank Accession No. NG_008963.1); a troponin I promoter (Gene ID Nos. 7135, 7136, and 7137: representative GenBank Accession Nos. NG_016649.1, NG_011621.1, and NG_007866.2); a myoD gene family promoter (Gene ID No. 4654; representative GenBank Accession No. NM_002478); an actin alpha promoter (Gene ID Nos. 58, 59, and 70; representative GenBank Accession Nos. NG_006672.1, NG_011541.1, and NG_007553.1); an actin beta promoter (Gene ID No. 60; representative GenBank Accession No. NG_007992.1); an actin gamma promoter (Gene ID No. 71 and 72; representative GenBank Accession No. NG_011433.1 and NM_001199893); a muscle-specific promoter residing within intron 1 of the ocular form of Pitx3 (Gene ID No. 5309) (the muscle-specific promoter corresponds to residues 11219-11527 of representative GenBank Accession No. NG_008147). In some embodiments, the promoter may be a muscle-specific creatine kinase 8 promoter (e.g., CK8 or CK8e).

[0082] In some embodiments, the muscle-specific promoter is the CK8 promoter. The CK8 promoter has the following sequence (SEQ ID NO: 18):

| | |
|---|---|
| 1 | CTAGACTAGC ATGCTGCCCA TGTAAGGAGG CAAGGCCTGG |
| | GGACACCCGA GATGCCTGGT |
| 61 | TATAATTAAC CCAGACATGT GGCTGCCCCC CCCCCCCCAA |
| | CACCTGCTGC CTCTAAAAAT |
| 121 | AACCCTGCAT GCCATGTTCC CGGCGAAGGG CCAGCTGTCC |
| | CCCGCCAGCT AGACTCAGCA |
| 181 | CTTAGTTTAG GAACCAGTGA GCAAGTCAGC CCTTGGGGCA |
| | GCCCATACAA GGCCATGGGG |
| 241 | CTGGGCAAGC TGCACGCCTG GGTCCGGGGT GGGCACGGTG |
| | CCCGGGCAAC GAGCTGAAAG |
| 301 | CTCATCTGCT CTCAGGGGCC CCTCCCTGGG GACAGCCCCT |
| | CCTGGCTAGT CACACCCTGT |
| 361 | AGGCTCCTCT ATATAACCCA GGGGCACAGG GGCTGCCCTC |
| | ATTCTACCAC CACCTCCACA |
| 421 | GCACAGACAG ACACTCAGGA GCCAGCCAGC. |

[0083] In some embodiments, the muscle-specific specific promoter is a variant of the CK8 promoter, called CK8e. The CK8e promoter has the following sequence (SEQ ID NO. 19):

| | |
|---|---|
| 1 | TGCCCATGTA AGGAGGCAAG GCCTGGGGAC ACCCGAGATG |
| | CCTGGTTATA ATTAACCCAG |
| 61 | ACATGTGGCT GCCCCCCCCC CCCCAACACC TGCTGCCTCT |
| | AAAAATAACC CTGCATGCCA |
| 121 | TGTTCCCGGC GAAGGGCCAG CTGTCCCCCG CCAGCTAGAC |
| | TCAGCACTTA GTTTAGGAAC |
| 181 | CAGTGAGCAA GTCAGCCCTT GGGGCAGCCC ATACAAGGCC |
| | ATGGGGCTGG GCAAGCTGCA |
| 241 | CGCCTGGGTC CGGGGTGGGC ACGGTGCCCG GGCAACGAGC |
| | TGAAAGCTCA TCTGCTCTCA |
| 301 | GGGGCCCCTC CCTGGGGACA GCCCCTCCTG GCTAGTCACA |
| | CCCTGTAGGC TCCTCTATAT |
| 361 | AACCCAGGGG CACAGGGGCT GCCCTCATTC TACCACCACC |
| | TCCACAGCAC AGACAGACAC |
| 421 | TCAGGAGCCA GCCAGC. |

[0084] In some embodiments, the AAV expression cassettes of the disclosure may comprise multiple expression control sequences, such as two, three, four, five, or more. In some embodiments, the AAV expression cassettes of the disclosure comprise two, three, four, five, or more promoters, enhancers, or combinations thereof. In some embodiments, the promoters/enhancers are the same. In other embodiments, the promoters/enhancers are different.

[0085] In some embodiments, the AAV expression cassettes comprise two promoters, wherein each promoter is independently selected from the U6 promoter, the H1 promoter, and the 7SK promoter. In some embodiments, the AAV expression cassettes comprise three promoters, wherein each promoter is independently selected from the U6 promoter, the H1 promoter, and the 7SK promoter. In some embodiments, the AAV expression cassettes comprise four or more promoters, wherein each promoter is independently selected from the U6 promoter, the H1 promoter, and the 7SK promoter.

### Filler or Stuffer Sequence

[0086] In some embodiments, the AAV expression cassette of the disclosure may comprise a filler or stuffer sequence. As used herein, a “filler” or “stuffer” sequence refers to a sequence that is inert or innocuous and has no function or activity. In some embodiments, a filler or stuffer polynucleotide sequence is not a bacterial polynucleotide sequence. In some embodiments, a filler or stuffer polynucleotide sequence is not a sequence that encodes a protein or peptide, a filler or stuffer polynucleotide sequence is a sequence distinct from any of: a gRNA, an AAV inverted terminal repeat (ITR) sequence, an expression control element (e.g., a promoter), an origin of replication, a selectable marker or a poly-Adenine (poly-A) sequence.

[0087] In some embodiments, a filler or stuffer sequence is an intron sequence that is related to or unrelated to the transgene sequence. In particular aspects, the intron sequence is positioned within the transgene sequence.

[0088] In some embodiments, the filler or stuffer sequence does not contain any open reading frames (ORFs). In some embodiments, the filler or stuffer sequence is isolated or derived from a 5′ or 3′ UTR sequence. In some embodiments, the filler or stuffer sequence is a 5′ or a 3′ UTR sequence which doesn't contain any ORFs. In some embodiments, the filler or stuffer sequence is isolated or derived from a gene expressed in muscle, such as desmin. In some embodiments, the filler or stuffer sequence is derived from a gene expressed in muscle, such as desmin, wherein all ORFs have been removed.

[0089] In some embodiments, the filler or stuffer sequence comprises a 3′ UTR sequence isolated or derived from a gene expressed in muscle. In some embodiments, a filler or stuffer sequence comprises or consists of the sequence of SEQ ID NO: 20, or a sequence at least 95%, at least 96%, at least 97%, at least 98%, or at least 99% identical thereto.

### AAV Nuclease Vector

[0090] In some embodiments, and AAV expression cassette may be used to produce an AAV vector comprising a nuclease. In some embodiments, the AAV expression cassette comprises sequences encoding a first ITR, a nuclease, and a second ITR. In some embodiments, the AAV expression cassette comprises sequences encoding a first ITR, a first promoter, a nuclease, and a second ITR. In some embodiments, the AAV expression cassette comprises sequences encoding a first ITR (e.g., a sequence with at least 95% or 100% identity to SEQ ID NO: 1), a first promoter, a nuclease, and a second ITR (e.g., a sequence with at least 95% or 100% identity to SEQ ID NO: 2). In some embodiments, the AAV expression cassette comprises sequences encoding a first ITR (e.g., a sequence with at least 95% or 100% identity to SEQ ID NO: 3), a first promoter, a nuclease, and a second ITR (e.g., a sequence with at least 95% or 100% identity to SEQ ID NO: 2). In some embodiments, the nuclease sequence is optimized for expression in mammalian cells. In some embodiments, the promoter drives expression of the nuclease in mammalian cells.

[0091] In some embodiments, the nuclease is a Type II, Type V-A, Type V-B, Type V-C, Type V-U, Type VI-B nuclease. In some embodiments, the nuclease is a Cas9, Cas12a, Cas12b, Cas12c, Tnp-B like, Cas13a (C2c2), or Cas13b nuclease. In some embodiments, the nuclease is a TAL nuclease, a meganuclease, or a zinc-finger nuclease. In some embodiments, the nuclease is a Cas9 nuclease. In some embodiments, the nuclease is a Cpf1 nuclease.

[0092] In embodiments, the nuclease is a Cas9 nuclease derived from S. pyogenes (SpCas9). An exemplary SpCas9 sequence is provided below (SEQ ID NO: 21):

| | |
|---|---|
| 1 | MDKKYSIGLD IGTNSVGWAV ITDEYKVPSK KFKVLGNTDR |
| | HSIKKNLIGA LLFDSGETAE |
| 61 | ATRLKRTARR RYTRRKNRIC YLQEIFSNEM AKVDDSFFHR |
| | LEESFLVEED KKHERHPIFG |
| 121 | NIVDEVAYHE KYPTIYHLRK KLVDSTDKAD LRLIYLALAH |
| | MIKFRGHFLI EGDLNPDNSD |
| 181 | VDKLFIQLVQ TYNQLFEENP INASGVDAKA ILSARLSKSR |
| | RLENLIAQLP GEKKNGLFGN |
| 241 | LIALSLGLTP NFKSNFDLAE DAKLQLSKDT YDDDLDNLLA |
| | QIGDQYADLF LAAKNLSDAI |
| 301 | LLSDILRVNT EITKAPLSAS MIKRYDEHHQ DLTLLKALVR |
| | QQLPEKYKEI FFDQSKNGYA |
| 361 | GYIDGGASQE EFYKFIKPIL EKMDGTEELL VKLNREDLLR |
| | KQRTFDNGSI PHQIHLGELH |
| 421 | AILRRQEDFY PFLKDNREKI EKILTFRIPY YVGPLARGNS |
| | RFAWMTRKSE ETITPWNFEE |
| 481 | VVDKGASAQS FIERMINFDK NLPNEKVLPK HSLLYEYFTV |
| | YNELTKVKYV TEGMRKPAFL |
| 541 | SGEQKKAIVD LLFKTNRKVT VKQLKEDYFK KIECFDSVEI |
| | SGVEDRFNAS LGTYHDLLKI |
| 601 | IKDKDFLDNE ENEDILEDIV LTLTLFEDRE MIEERLKTYA |
| | HLFDDKVMKQ LKRRRYTGWG |
| 661 | RLSRKLINGI RDKQSGKTIL DFLKSDGFAN RNFMQLIHDD |
| | SLTFKEDIQK AQVSGQGDSL |
| 721 | HEHIANLAGS PAIKKGILQT VKVVDELVKV MGRHKPENIV |
| | IEMARENQTT QKGQKNSRER |
| 781 | MKRIEEGIKE LGSQILKEHP VENTQLQNEK LYLYYLQNGR |
| | DMYVDQELDI NRLSDYDVDH |
| 841 | IVPQSFLKDD SIDNKVLTRS DKNRGKSDNV PSEEVVKKMK |
| | NYWRQLLNAK LITQRKFDNL |
| 901 | TKAERGGLSE LDKAGFIKRQ LVETRQITKH VAQILDSRMN |
| | TKYDENDKLI REVKVITLKS |
| 961 | KLVSDFRKDF QFYKVREINN YHHAHDAYLN AVVGTALIKK |
| | YPKLESEFVY GDYKVYDVRK |
| 1021 | MIAKSEQEIG KATAKYFFYS NIMNFFKTEI TLANGEIRKR |
| | PLIETNGETG EIVWDKGRDF |
| 1081 | ATVRKVLSMP QVNIVKKTEV QTGGFSKESI LPKRNSDKLI |
| | ARKKDWDPKK YGGFDSPTVA |
| 1141 | YSVLVVAKVE KGKSKKLKSV KELLGITIME RSSFEKNPID |
| | FLEAKGYKEV KKDLIIKLPK |
| 1201 | YSLFELENGR KRMLASAGEL QKGNELALPS KYVNFLYLAS |
| | HYEKLKGSPE DNEQKQLFVE |
| 1261 | QHKHYLDEII EQISEFSKRV ILADANLDKV LSAYNKHRDK |
| | PIREQAENII HLFTLTNLGA |
| 1321 | PAAFKYFDTT IDRKRYTSTK EVLDATLIHQ SITGLYETRI |
| | DLSQLGGD |

[0093] In embodiments, the nuclease is a Cas9 derived from S. aureus (SaCas9). An exemplary SaCas9 sequence is provided below (SEQ ID NO: 22):

| | |
|---|---|
| 1 | MKRNYILGLD IGITSVGYGI IDYETRDVID AGVRLFKEAN |
| | VENNEGRRSK RGARRLKRRR |
| 61 | RHRIQRVKKL LFDYNLLTDH SELSGINPYE ARVKGLSQKL |
| | SEEEFSAALL HLAKRRGVHN |
| 121 | VNEVEEDTGN ELSTKEQISR NSKALEEKYV AELQLERLKK |
| | DGEVRGSINR FKTSDYVKEA |
| 181 | KQLLKVQKAY HQLDQSFIDT YIDLLETRRT YYEGPGEGSP |
| | FGWKDIKEWY EMLMGHCTYF |
| 241 | PEELRSVKYA YNADLYNALN DLNNLVITRD ENEKLEYYEK |
| | FQIIENVFKQ KKKPTLKQIA |
| 301 | KEILVNEEDI KGYRVTSTGK PEFTNLKVYH DIKDITARKE |
| | IIENAELLDQ IAKILTIYQS |
| 361 | SEDIQEELTN LNSELTQEEI EQISNLKGYT GTHNLSLKAI |
| | NLILDELWHT NDNQIAIFNR |
| 421 | LKLVPKKVDL SQQKEIPTTL VDDFILSPVV KRSFIQSIKV |
| | INAIIKKYGL PNDIIIELAR |
| 481 | EKNSKDAQKM INEMQKRNRQ TNERIEEIIR TTGKENAKYL |
| | IEKIKLHDMQ EGKCLYSLEA |
| 541 | IPLEDLLNNP FNYEVDHIIP RSVSFDNSFN NKVLVKQEEN |
| | SKKGNRTPFQ YLSSSDSKIS |
| 601 | YETFKKHILN LAKGKGRISK TKKEYLLEER DINRFSVQKD |
| | FINRNLVDTR YATRGLMNLL |
| 661 | RSYFRVNNLD VKVKSINGGF TSFLRRKWKF KKERNKGYKH |
| | HAEDALIIAN ADFIFKEWKK |
| 721 | LDKAKKVMEN QMFEEKQAES MPEIETEQEY KEIFITPHQI |
| | KHIKDFKDYK YSHRVDKKPN |
| 781 | RELINDTLYS TRKDDKGNTL IVNNLNGLYD KDNDKLKKLI |
| | NKSPEKLLMY HHDPQTYQKL |
| 841 | KLIMEQYGDE KNPLYKYYEE TGNYLTKYSK KDNGPVIKKI |
| | KYYGNKLNAH LDITDDYPNS |
| 901 | RNKVVKLSLK PYRFDVYLDN GVYKFVTVKN LDVIKKENYY |
| | EVNSKCYEEA KKLKKISNQA |
| 961 | EFIASFYNND LIKINGELYR VIGVNNDLLN RIEVNMIDIT |
| | YREYLENMND KRPPRIIKTI |
| 1021 | ASKTQSIKKY STDILGNLYE VKSKKHPQII |

[0094] In embodiments, the Cpf1 is a Cpf1 enzyme from Acidaminococcus (species BV3L6, UniProt Accession No. U2UMQ6; SEQ ID NO: 23), having the sequence set forth below:

| | |
|---|---|
| 1 | MTQFEGFTNL YQVSKTLRFE LIPQGKTLKH IQEQGFIEED |
| | KARNDHYKEL KPIIDRIYKT |
| 61 | YADQCLQLVQ LDWENLSAAI DSYRKEKTEE TRNALIEEQA |
| | TYRNAIHDYF IGRIDNLIDA |
| 121 | INKRHAEIYK GLFKAELENG KVLKQLGTVT TTEHENALLR |
| | SFDKFTTYFS GFYENRKNVF |
| 181 | SAEDISTAIP HRIVQDNFPK FKENCHIFTR LITAVPSLRE |
| | HFENVKKAIG IFVSTSIEEV |
| 241 | FSFPFYNQLL TQTQIDLYNQ LLGGISREAG TEKIKGLNEV |
| | LNLAIQKNDE TAHIIASLPH |
| 301 | RFIPLFKQIL SDRNTLSFIL EEFKSDEEVI QSFCKYKTLL |
| | RNENVLETAE ALFNELNSID |
| 361 | LTHIFISHKK LETISSALCD HWDTLRNALY ERRISELTGK |
| | ITKSAKEKVQ RSLKHEDINL |
| 421 | QEIISAAGKE LSEAFKQKTS EILSHAHAAL DQPLPTTLKK |
| | QEEKEILKSQ LDSLLGLYHL |
| 481 | LDWFAVDESN EVDPEFSARL TGIKLEMEPS LSFYNKARNY |
| | ATKKPYSVEK FKLNFQMPTL |
| 541 | ASGWDVNKEK NNGAILFVKN GLYYLGIMPK QKGRYKALSF |
| | EPTEKTSEGF DKMYYDYFPD |
| 601 | AAKMIPKCST QLKAVTAHFQ THTTPILLSN NFIEPLEITK |
| | EIYDLNNPEK EPKKFQTAYA |
| 661 | KKTGDQKGYR EALCKWIDFT RDFLSKYTKT TSIDLSSLRP |
| | SSQYKDLGEY YAELNPLLYH |
| 721 | ISFQRIAEKE IMDAVETGKL YLFQIYNKDF AKGHHGKPNL |
| | HTLYWTGLFS PENLAKTSIK |
| 781 | LNGQAELFYR PKSRMKRMAH RLGEKMLNKK LKDQKTPIPD |
| | TLYQELYDYV NHRLSHDLSD |
| 841 | EARALLPNVI TKEVSHEIIK DRRFTSDKFF FHVPITLNYQ |
| | AANSPSKFNQ RVNAYLKEHP |
| 901 | ETPIIGIDRG ERNLIYITVI DSTGKILEQR SLNTIQQFDY |
| | QKKLDNREKE RVAARQAWSV |
| 961 | VGTIKDLKQG YLSQVIHEIV DLMIHYQAVV VLENLNFGFK |
| | SKRTGIAEKA VYQQFEKMLI |
| 1021 | DKLNCLVLKD YPAEKVGGVL NPYQLTDQFT SFAKMGTQSG |
| | FLFYVPAPYT SKIDPLTGFV |
| 1081 | DPFVWKTIKN HESRKHFLEG FDFLHYDVKT GDFILHFKMN |
| | RNLSFQRGLP GFMPAWDIVF |
| 1141 | EKNETQFDAK GTPFIAGKRI VPVIENHRFT GRYRDLYPAN |
| | ELIALLEEKG IVFRDGSNIL |
| 1201 | PKLLENDDSH AIDTMVALIR SVLQMRNSNA ATGEDYINSP |
| | VRDLNGVCFD SRFQNPEWPM |
| 1261 | DADANGAYHI ALKGQLLLNH LKESKDLKLQ NGISNQDWLA |
| | YIQELRN. |

[0095] In some embodiments, the Cpf1 is a Cpf1 enzyme from Lachnospiraceae (species ND2006, UniProt Accession No. A0A182DWE3; SEQ ID NO: 24), having the sequence set forth below:

| | |
|---|---|
| 1 | AASKLEKFTN CYSLSKTLRF KAIPVGKTQE NIDNKRLLVE |
| | DEKRAEDYKG VKKLLDRYYL |
| 61 | SFINDVLHSI KLKNLNNYIS LFRKKTRTEK ENKELENLEI |
| | NLRKEIAKAF KGAAGYKSLF |
| 121 | KKDIIETILP EAADDKDEIA LVNSENGETT AFTGFFDNRE |
| | NMFSEEAKST SIAFRCINEN |
| 181 | LTRYISNMDI FEKVDAIFDK HEVQEIKEKI LNSDYDVEDF |
| | FEGEFFNFVL TQEGIDVYNA |
| 241 | IIGGFVTESG EKIKGLNEYI NLYNAKTKQA LPKFKPLYKQ |
| | VLSDRESLSF YGEGYTSDEE |
| 301 | VLEVFRNTLN KNSEIFSSIK KLEKLFKNFD EYSSAGIFVK |
| | NGPAISTISK DIFGEWNLIR |
| 361 | DKWNAEYDDI HLKKKAVVTE KYEDDRRKSF KKIGSFSLEQ |
| | LQEYADADLS VVEKLKEIII |
| 421 | QKVDEIYKVY GSSEKLFDAD FVLEKSLKKN DAVVAIMKDL |
| | LDSVKSFENY IKAFFGEGKE |
| 481 | TNRDESFYGD FVLAYDILLK VDHIYDAIRN YVTQKPYSKD |
| | KFKLYFQNPQ FMGGWDKDKE |
| 541 | TDYRATILRY GSKYYLAIMD KKYAKCLQKI DKDDVNGNYE |
| | KINYKLLPGP NKMLPKVFFS |
| 601 | KKWMAYYNPS EDIQKIYKNG TFKKGDMFNL NDCHKLIDFF |
| | KDSISRYPKW SNAYDFNFSE |
| 661 | TEKYKDIAGF YREVEEQGYK VSFESASKKE VDKLVEEGKL |
| | YMFQIYNKDF SDKSHGTPNL |
| 721 | HTMYFKLLFD ENNHGQIRLS GGAELFMRRA SLKKEELVVH |
| | PANSPIANKN PDNPKKTTTL |
| 781 | SYDVYKDKRF SEDQYELHIP IAINKCPKNI FKINTEVRVL |
| | LKHDDNPYVI GIDRGERNLL |
| 841 | YIVVVDGKGN IVEQYSLNEI INNFNGIRIK TDYHSLLDKK |
| | EKERFEARQN WTSIENIKEL |
| 901 | KAGYISQVVH KICELVEKYD AVIALEDLNS GFKNSRVKVE |
| | KQVYQKFEKM LIDKLNYMVD |
| 961 | KKSNPCATGG ALKGYQITNK FESFKSMSTQ NGFIFYIPAW |
| | LTSKIDPSTG FVNLLKTKYT |
| 1021 | SIADSKKFIS SFDRIMYVPE EDLFEFALDY KNFSRTDADY |
| | IKKWKLYSYG NRIRIFAAAK |
| 1081 | KNNVFAWEEV CLTSAYKELF NKYGINYQQG DIRALLCEQS |
| | DKAFYSSFMA LMSLMLQMRN |
| 1141 | SITGRTDVDF LISPVKNSDG IFYDSRNYEA QENAILPKNA |
| | DANGAYNIAR KVLWAIGQFK |
| 1201 | KAEDEKLDKV KIAISNKEWL EYAQTSVK |

### Vectors

[0096] The AAV expression cassettes disclosed herein may be packaged into a vector, and used to deliver DNA sequences to a cell or tissue of interest. The vector may be, for example, a non-viral vector (such as a plasmid or a nanoparticle), or a viral vector (such as an AAV or a baculovirus).

[0097] Thus, provided herein is an AAV vector comprising an AAV expression cassette of the disclosure. The AAV vector may be of any serotype. For example, the AAV vector may be an AAV1, AAV2, AAV3, AAV4, AAV5, AAV6, AAV7, AAV8, AAV9, AAV10, AAV11, AAV12, AAVRh74, AAV2i8, AAVRh10, AAV39, AAV43, AAVRh8, avian AAV, bovine AAV, canine AAV, equine AAV, or an ovine AAV vector. In some embodiments, the AAV vector is non-naturally occurring. For example, the AAV vector may be chimeric or an AAV vector whose capsid protein has one or more mutations compared to wildtype. In some embodiments, the AAV vector may be replication-defective or conditionally replication defective. In some embodiments, the AAV vector may be self-complimentary (scAAV).

[0098] In some embodiments, the AAV vector is selected from one of the serotypes listed in Table 18.

TABLE 18
AAV Serotypes and Capsid Sequences

| | Seq ID |
|---|---|
| Serotype | No. |
| VOY1O1 | 2379 |
| VOY201 | 2380 |
| PHP.N/PHP.B- | 2381 |
| DGT | |
| AAVPHP.B or | 2382 |
| G2B-26 | |
| AAVPHP.B | 2383 |
| AAVG2B-13 | 2384 |
| AAVTH1.1-32 | 2385 |
| AAVTH1.1-35 | 2386 |
| PHP.S/G2A12 | 2387 |
| AAV9/hu.14 | 2388 |
| K449R | |
| AAV1 | 2389 |
| AAV1 | 2390 |
| AAV1 | 2391 |
| AAV1.3 | 2392 |
| AAV1O | 2393 |
| AAV1O | 2394 |
| AAV1O | 2395 |
| AAV11 | 2396 |
| AAV12 | 2397 |
| AAV2 | 2398 |
| AAV2 | 2399 |
| AAV2 | 2400 |
| AAV2 | 2401 |
| AAV2 | 2402 |
| AAV2.5T | 2403 |
| AAV223.10 | 2404 |
| AAV223.2 | 2405 |
| AAV223.2 | 2406 |
| AAV223.4 | 2407 |
| AAV223.4 | 2408 |
| AAV223.5 | 2409 |
| AAV223.5 | 2410 |
| AAV223.6 | 2411 |
| AAV223.6 | 2412 |
| AAV223.7 | 2413 |
| AAV223.7 | 2414 |
| AAV29.3 | 2415 |
| AAV29.4 | 2416 |
| AAV29.5 | 2417 |
| AAV29.5 | 2418 |
| (AAVbb .2) | |
| AAV3 | 2419 |
| AAV3 | 2420 |
| AAV3 | 2421 |
| AAV3.3b | 2422 |
| AAV3-3 | 2423 |
| AAV3-3 | 2424 |
| AAV3a | 2425 |
| AAV3a | 2426 |
| AAV3b | 2427 |
| AAV3b | 2428 |
| AAV3b | 2429 |
| AAV4 | 2430 |
| AAV4 | 2431 |
| AAV4 | 2432 |
| AAV4 | 2433 |
| AAV4 | 2434 |
| AAV4 | 2435 |
| AAV4 | 2436 |
| AAV4 | 2437 |
| AAV4 | 2438 |
| AAV4 | 2439 |
| AAV4 | 2440 |
| AAV4 | 2441 |
| AAV4 | 2442 |
| AAV4 | 2443 |
| AAV4 | 2444 |
| AAV4 | 2445 |
| AAV4 | 2446 |
| AAV4 | 2447 |
| AAV4 | 2448 |
| AAV4 | 2449 |
| AAV42.2 | 2450 |
| AAV42.2 | 2451 |
| AAV42.3b | 2452 |
| AAV42.3B | 2453 |
| AAV42.4 | 2454 |
| AAV42.4 | 2455 |
| AAV42.8 | 2456 |
| AAV42.8 | 2457 |
| AAV43.1 | 2458 |
| AAV43.1 | 2459 |
| AAV43.12 | 2460 |
| AAV43.12 | 2461 |
| AAV43.20 | 2462 |
| AAV43.20 | 2463 |
| AAV43.21 | 2464 |
| AAV43.21 | 2465 |
| AAV43.23 | 2466 |
| AAV43.23 | 2467 |
| AAV43.25 | 2468 |
| AAV43.25 | 2469 |
| AAV43.5 | 2470 |
| AAV43.5 | 2471 |
| AAV4-4 | 2472 |
| AAV4-4 | 2473 |
| AAV44.1 | 2474 |
| AAV44.1 | 2475 |
| AAV44.5 | 2476 |
| AAV44.5 | 2477 |
| AAV4407 | 2478 |
| AAV5 | 2479 |
| AAV5 | 2480 |
| AAV5 | 2481 |
| AAV5 | 2482 |
| AAV6 | 2483 |
| AAV6 | 2484 |
| AAV6 | 2485 |
| AAV6 | 2486 |
| AAV6 | 2487 |
| AAV6 | 2488 |
| AAV6.1 | 2489 |
| AAV6.12 | 2490 |
| AAV6.2 | 2491 |
| AAV7 | 2492 |
| AAV7 | 2493 |
| AAV7 | 2494 |
| AAV7 | 2495 |
| AAV7 | 2496 |
| AAV7 | 2497 |
| AAV7 | 2498 |
| AAV8 | 2499 |
| AAV8 | 2500 |
| AAV8 | 2501 |
| AAV8 | 2502 |
| AAV8 | 2503 |
| AAV8 | 2504 |
| AAV-8b | 2505 |
| AAV-8b | 2506 |
| AAV-8h | 2507 |
| AAV-8h | 2508 |
| AAV9 | 2509 |
| AAV9 | 2510 |
| AAV9 | 2511 |
| AAV9 | 2512 |
| AAV9 | 2513 |
| AAV9 | 2514 |
| (AAVhu.14) | |
| AAV9 | 2515 |
| (AAVhu.14) | |
| AAVA3.1 | 2516 |
| AAVA3.3 | 2517 |
| AAVA3.3 | 2518 |
| AAVA3.4 | 2519 |
| AAVA3.4 | 2520 |
| AAVA3.5 | 2521 |
| AAVA3.5 | 2522 |
| AAVA3.7 | 2523 |
| AAVA3.7 | 2524 |
| AAV29.3 | 2525 |
| (AAVbb.1) | |
| AAVC2 | 2526 |
| AAVCh.5 | 2527 |
| AAVcy.2 | 2528 |
| (AAV13.3) | |
| AAV24.1 | 2529 |
| AAVcy.3 | 2530 |
| (AAV24.1) | |
| AAV27.3 | 2531 |
| AAVcy.4 | 2532 |
| (AAV27.3) | |
| AAVcy.5 | 2533 |
| AAV7.2 | 2534 |
| AAVcy.5 | 2535 |
| (AAV7.2) | |
| AAV16.3 | 2536 |
| AAVcy.6 | 2537 |
| (AAV16.3) | |
| AAVcy.5 | 2538 |
| AAVcy.5 | 2539 |
| AAVCy.5R1 | 2540 |
| AAVCy.5R2 | 2541 |
| AAVCy.5R3 | 2542 |
| AAVCy.5R4 | 2543 |
| AAVDJ | 2544 |
| AAVDJ | 2545 |
| AAVDJ-8 | 2546 |
| AAVDJ-8 | 2547 |
| AAVF5 | 2548 |
| AAVH2 | 2549 |
| AAVH6 | 2550 |
| AAVhE1.1 | 2551 |
| AAVhEr1.14 | 2552 |
| AAVhEr1.16 | 2553 |
| AAVhEr1.18 | 2554 |
| AAVhEr1.23 | 2555 |
| (AAVhEr2.29) | |
| AAVhEr1.35 | 2556 |
| AAVhEr1.36 | 2557 |
| AAVhEr1.5 | 2558 |
| AAVhEr1.7 | 2559 |
| AAVhEr1.8 | 2560 |
| AAVhEr2.16 | 2561 |
| AAVhEr2.30 | 2562 |
| AAVhEr2.31 | 2563 |
| AAVhEr2.36 | 2564 |
| AAVhEr2.4 | 2565 |
| AAVhEr3.1 | 2566 |
| AAVhu.1 | 2567 |
| AAVhu.1 | 2568 |
| AAVhu. 10 | 2569 |
| (AAV16. 8) | |
| AAVhu. 10 | 2570 |
| (AAV16. 8) | |
| AAVhu.11 | 2571 |
| (AAV16.12) | |
| AAVhu.11 | 2572 |
| (AAV16.12) | |
| AAVhu.12 | 2573 |
| AAVhu.12 | 2574 |
| AAVhu.13 | 2575 |
| AAVhu.13 | 2576 |
| AAVhu.136.1 | 2577 |
| AAVhu.140.1 | 2578 |
| AAVhu.140.2 | 2579 |
| AAVhu.145.6 | 2580 |
| AAVhu.15 | 2581 |
| AAVhu.15 | 2582 |
| (AAV33 .4) | |
| AAVhu.156.1 | 2583 |
| AAVhu.16 | 2584 |
| AAVhu.16 | 2585 |
| (AAV33 .8) | |
| AAVhu.17 | 2586 |
| AAVhu.17 | 2587 |
| (AAV33.12) | |
| AAVhu.172.1 | 2588 |
| AAVhu.172.2 | 2589 |
| AAVhu.173.4 | 2590 |
| AAVhu.173.8 | 2591 |
| AAVhu.18 | 2592 |
| AAVhu.18 | 2593 |
| AAVhu.19 | 2594 |
| AAVhu.19 | 2595 |
| AAVhu.2 | 2596 |
| AAVhu.2 | 2597 |
| AAVhu.20 | 2598 |
| AAVhu.20 | 2599 |
| AAVhu.21 | 2600 |
| AAVhu.21 | 2601 |
| AAVhu.22 | 2602 |
| AAVhu.22 | 2603 |
| AAVhu.23 | 2604 |
| AAVhu.23.2 | 2605 |
| AAVhu.24 | 2606 |
| AAVhu.24 | 2607 |
| AAVhu.25 | 2608 |
| AAVhu.25 | 2609 |
| AAVhu.26 | 2610 |
| AAVhu.26 | 2611 |
| AAVhu.27 | 2612 |
| AAVhu.27 | 2613 |
| AAVhu.28 | 2614 |
| AAVhu.28 | 2615 |
| AAVhu.29 | 2616 |
| AAVhu.29 | 2617 |
| AAVhu.29 | 2618 |
| AAVhu.29R | 2619 |
| AAVhu.3 | 2620 |
| AAVhu.3 | 2621 |
| AAVhu.30 | 2622 |
| AAVhu.30 | 2623 |
| AAVhu.31 | 2624 |
| AAVhu.31 | 2625 |
| AAVhu.32 | 2626 |
| AAVhu.32 | 2627 |
| AAVhu.33 | 2628 |
| AAVhu.33 | 2629 |
| AAVhu.34 | 2630 |
| AAVhu.34 | 2631 |
| AAVhu.35 | 2632 |
| AAVhu.35 | 2633 |
| AAVhu.36 | 2634 |
| AAVhu.36 | 2635 |
| AAVhu.37 | 2636 |
| AAVhu.37 | 2637 |
| (AAV106.1) | |
| AAVhu.38 | 2638 |
| AAVhu.39 | 2639 |
| AAVhu.39 | 2640 |
| (AAVLG-9) | |
| AAVhu.4 | 2641 |
| AAVhu.4 | 2642 |
| AAVhu.40 | 2643 |
| AAVhu.40 | 2644 |
| (AAV1 14.3) | |
| AAVhu.41 | 2645 |
| AAVhu.41 | 2646 |
| (AAV127.2) | |
| AAVhu.42 | 2647 |
| AAVhu.42 | 2648 |
| (AAV127.5) | |
| AAVhu.43 | 2649 |
| AAVhu.43 | 2650 |
| AAVhu.43 | 2651 |
| (AAV128. 1) | |
| AAVhu.44 | 2652 |
| AAVhu.44 | 2653 |
| (AAV128.3) | |
| AAVhu.44R1 | 2654 |
| AAVhu.44R2 | 2655 |
| AAVhu.44R3 | 2656 |
| AAVhu.45 | 2657 |
| AAVhu.45 | 2658 |
| AAVhu.46 | 2659 |
| AAVhu.46 | 2660 |
| AAVhu.46 | 2661 |
| AAVhu.47 | 2662 |
| AAVhu.47 | 2663 |
| AAVhu.48 | 2664 |
| AAVhu.48 | 2665 |
| AAVhu.48 | 2666 |
| (AAV130.4) | |
| AAVhu.48R1 | 2667 |
| AAVhu.48R2 | 2668 |
| AAVhu.48R3 | 2669 |
| AAVhu.49 | 2670 |
| AAVhu.49 | 2671 |
| AAVhu.5 | 2672 |
| AAVhu.5 | 2673 |
| AAVhu.51 | 2674 |
| AAVhu.51 | 2675 |
| AAVhu.52 | 2676 |
| AAVhu.52 | 2677 |
| AAVhu.53 | 2678 |
| AAVhu.53 | 2679 |
| AAVhu.53 | 2680 |
| (AAV145.1) | |
| AAVhu.54 | 2681 |
| AAVhu.54 | 2682 |
| (AAV145.5) | |
| AAVhu.55 | 2683 |
| AAVhu.56 | 2684 |
| AAVhu.56 | 2685 |
| (AAV145.6) | |
| AAVhu.56 | 2686 |
| (AAV145.6) | |
| AAVhu.57 | 2687 |
| AAVhu.57 | 2688 |
| AAVhu.57 | 2689 |
| AAVhu.58 | 2690 |
| AAVhu.58 | 2691 |
| AAVhu.6 | 2692 |
| (AAV3.1) | |
| AAVhu.6 | 2693 |
| (AAV3.1) | |
| AAVhu.60 | 2694 |
| AAVhu.60 | 2695 |
| (AAV161.10) | |
| AAVhu.61 | 2696 |
| AAVhu.61 | 2697 |
| (AAV161.6) | |
| AAVhu.63 | 2698 |
| AAVhu.63 | 2699 |
| AAVhu.64 | 2700 |
| AAVhu.64 | 2701 |
| AAVhu.66 | 2702 |
| AAVhu.67 | 2703 |
| AAVhu.67 | 2704 |
| AAVhu.7 | 2705 |
| AAVhu.7 | 2706 |
| AAVhu.7 | 2707 |
| (AAV7.3) | |
| AAVhu.71 | 2708 |
| AAVhu.8 | 2709 |
| AAVhu.8 | 2710 |
| AAVhu.8 | 2711 |
| AAVhu.9 | 2712 |
| (AAV3.1) | |
| AAVhu.9 | 2713 |
| (AAV3.1) | |
| AAV-LKO1 | 2714 |
| AAV-LKO1 | 2715 |
| AAV-LK02 | 2716 |
| AAV-LK02 | 2717 |
| AAV-LK03 | 2718 |
| AAV-LK03 | 2719 |
| AAV-LK04 | 2720 |
| AAV-LK04 | 2721 |
| AAV-LK05 | 2722 |
| AAV-LK05 | 2723 |
| AAV-LK06 | 2724 |
| AAV-LK06 | 2725 |
| AAV-LK07 | 2726 |
| AAV-LK07 | 2727 |
| AAV-LK08 | 2728 |
| AAV-LK08 | 2729 |
| AAV-LK09 | 2730 |
| AAV-LK09 | 2731 |
| AAV-LK1O | 2732 |
| AAV-LK1O | 2733 |
| AAV-LK11 | 2734 |
| AAV-LK11 | 2735 |
| AAV-LK12 | 2736 |
| AAV-LK12 | 2737 |
| AAV-LK13 | 2738 |
| AAV-LK13 | 2739 |
| AAV-LK14 | 2740 |
| AAV-LK14 | 2741 |
| AAV-LK15 | 2742 |
| AAV-LK15 | 2743 |
| AAV-LK16 | 2744 |
| AAV-LK16 | 2745 |
| AAV-LK17 | 2746 |
| AAV-LK17 | 2747 |
| AAV-LK18 | 2748 |
| AAV-LK18 | 2749 |
| AAV-LK19 | 2750 |
| AAV-LK19 | 2751 |
| AAV-PAEC | 2752 |
| AAV-PAEC | 2753 |
| AAV-PAEC11 | 2754 |
| AAV-PAEC11 | 2755 |
| AAV-PAEC12 | 2756 |
| AAV-PAEC12 | 2757 |
| AAV-PAEC13 | 2758 |
| AAV-PAEC13 | 2759 |
| AAV-PAEC2 | 2760 |
| AAV-PAEC2 | 2761 |
| AAV-PAEC4 | 2762 |
| AAV-PAEC4 | 2763 |
| AAV-PAEC6 | 2764 |
| AAV-PAEC6 | 2765 |
| AAV-PAEC7 | 2766 |
| AAV-PAEC7 | 2767 |
| AAV-PAEC8 | 2768 |
| AAV-PAEC8 | 2769 |
| AAVpi.1 | 2770 |
| AAVpi.1 | 2771 |
| AAVpi.2 | 2772 |
| AAVpi.2 | 2773 |
| AAVpi.3 | 2774 |
| AAVpi.3 | 2775 |
| AAVrh.10 | 2776 |
| AAVrh.10 | 2777 |
| AAV44.2 | 2778 |
| AAVrh.10 | 2779 |
| (AAV44.2) | |
| AAV42.1B | 2780 |
| AAVrh.12 | 2781 |
| (AAV42.1b) | |
| AAVrh.13 | 2782 |
| AAVrh.13 | 2783 |
| AAVrh.13 | 2784 |
| AAVrh.13R | 2785 |
| AAV42.3A | 2786 |
| AAVrh.14 | 2787 |
| (AAV42.3a) | |
| AAV42.5A | 2788 |
| AAVrh.17 | 2789 |
| (AAV42.5a) | |
| AAV42.5B | 2790 |
| AAVrh.18 | 2791 |
| (AAV42.5b) | |
| AAV42.6B | 2792 |
| AAVrh.19 | 2793 |
| (AAV42.6b) | |
| AAVrh.2 | 2794 |
| AAVrh.2 | 2795 |
| AAVrh.20 | 2796 |
| AAV42.10 | 2797 |
| AAVrh.21 | 2798 |
| (AAV42.10) | |
| AAV42.11 | 2799 |
| AAVrh.22 | 2800 |
| (AAV42.11) | |
| AAV42.12 | 2801 |
| AAVrh.23 | 2802 |
| (AAV42.12) | |
| AAV42.13 | 2803 |
| AAVrh.24 | 2804 |
| (AAV42.13) | |
| AAV42.15 | 2805 |
| AAVrh.25 | 2806 |
| (AAV42.15) | |
| AAVrh.2R | 2807 |
| AAVrh.31 | 2808 |
| (AAV223.1) | |
| AAVC1 | 2809 |
| AAVrh.32 | 2810 |
| (AAVC1) | |
| AAVrh.32/33 | 2811 |
| AAVrh.33 | 2812 |
| (AAVC3) | |
| AAVC5 | 2813 |
| AAVrh.34 | 2814 |
| (AAVC5) | |
| AAVF1 | 2815 |
| AAVrh.35 | 2816 |
| (AAVF1) | |
| AAVF3 | 2817 |
| AAVrh.36 | 2818 |
| (AAVF3) | |
| AAVrh.37 | 2819 |
| AAVrh.37 | 2820 |
| AAVrh.37 | 2821 |
| AAVrh.37R2 | 2822 |
| AAVrh.38 | 2823 |
| (AAVLG-4) | |
| AAVrh.38 | 2824 |
| (AAVLG-4) | |
| AAVrh.39 | 2825 |
| AAVrh.39 | 2826 |
| AAVrh.40 | 2827 |
| AAVrh.40 | 2828 |
| (AAVLG-10) | |
| AAVrh.43 | 2829 |
| (AAVN721-8) | |
| AAVrh.43 | 2830 |
| (AAVN721-8) | |
| AAVrh.44 | 2831 |
| AAVrh.44 | 2832 |
| AAVrh.45 | 2833 |
| AAVrh.45 | 2834 |
| AAVrh.46 | 2835 |
| AAVrh.46 | 2836 |
| AAVrh.47 | 2837 |
| AAVrh.47 | 2838 |
| AAVrh.48 | 2839 |
| AAVrh.48.1 | 2840 |
| AAVrh.48.1.2 | 2841 |
| AAVrh.48.2 | 2842 |
| AAVrh.48 | 2843 |
| (AAV1-7) | |
| AAVrh.49 | 2844 |
| (AAV1-8) | |
| AAVrh.49 | 2845 |
| (AAV1-8) | |
| AAVrh.50 | 2846 |
| (AAV2-4) | |
| AAVrh.50 | 2847 |
| (AAV2-4) | |
| AAVrh.51 | 2848 |
| (AAV2-5) | |
| AAVrh.51 | 2849 |
| (AAV2-5) | |
| AAVrh.52 | 2850 |
| (AAV3-9) | |
| AAVrh.52 | 2851 |
| (AAV3-9) | |
| AAVrh.53 | 2852 |
| AAVrh.53 | 2853 |
| (AAV3-11) | |
| AAVrh.53 | 2854 |
| (AAV3-11) | |
| AAVrh.54 | 2855 |
| AAVrh.54 | 2856 |
| AAVrh.55 | 2857 |
| AAVrh.55 | 2858 |
| (AAV4-19) | |
| AAVrh.56 | 2859 |
| AAVrh.56 | 2860 |
| AAVrh.57 | 2861 |
| AAVrh.57 | 2862 |
| AAVrh.58 | 2863 |
| AAVrh.58 | 2864 |
| AAVrh.58 | 2865 |
| AAVrh.59 | 2866 |
| AAVrh.59 | 2867 |
| AAVrh.60 | 2868 |
| AAVrh.60 | 2869 |
| AAVrh.61 | 2870 |
| AAVrh.61 | 2871 |
| (AAV2-3) | |
| AAVrh.62 | 2872 |
| (AAV2-15) | |
| AAVrh.62 | 2873 |
| (AAV2-15) | |
| AAVrh.64 | 2874 |
| AAVrh.64 | 2875 |
| AAVrh.64 | 2876 |
| AAVRh.64R1 | 2877 |
| AAVRh.64R2 | 2878 |
| AAVrh.65 | 2879 |
| AAVrh.65 | 2880 |
| AAVrh.67 | 2881 |
| AAVrh.67 | 2882 |
| AAVrh.67 | 2883 |
| AAVrh.68 | 2884 |
| AAVrh.68 | 2885 |
| AAVrh.69 | 2886 |
| AAVrh.69 | 2887 |
| AAVrh.70 | 2888 |
| AAVrh.70 | 2889 |
| AAVrh.71 | 2890 |
| AAVrh.72 | 2891 |
| AAVrh.73 | 2892 |
| AAVrh.74 | 2893 |
| AAVrh.8 | 2894 |
| AAVrh.8 | 2895 |
| AAVrh.8R | 2896 |
| AAVrh.8R | 2897 |
| A586R mutant | |
| AAVrh.8R | 2898 |
| R533A mutant | |
| BAAV (bovine | 2899 |
| AAV) | |
| BAAV (bovine | 2900 |
| AAV) | |
| BAAV (bovine | 2901 |
| AAV) | |
| BAAV (bovine | 2902 |
| AAV) | |
| BAAV (bovine | 2903 |
| AAV) | |
| BAAV (bovine | 2904 |
| AAV) | |
| BAAV (bovine | 2905 |
| AAV) | |
| BAAV (bovine | 2906 |
| AAV) | |
| BAAV (bovine | 2907 |
| AAV) | |
| BAAV (bovine | 2908 |
| AAV) | |
| BAAV (bovine | 2909 |
| AAV) | |
| BAAV (bovine | 2910 |
| AAV) | |
| BAAV (bovine | 2911 |
| AAV) | |
| BNP61 AAV | 2912 |
| BNP61 AAV | 2913 |
| BNP62AAV | 2914 |
| BNP63 AAV | 2915 |
| caprine AAV | 2916 |
| caprine AAV | 2917 |
| true type AAV | 2918 |
| (ttAAV) | |
| AAAV (Avian | 2919 |
| AAV) | |
| AAAV (Avian | 2920 |
| AAV) | |
| AAAV (Avian | 2921 |
| AAV) | |
| AAAV (Avian | 2922 |
| AAV) | |
| AAAV (Avian | 2923 |
| AAV) | |
| AAAV (Avian | 2924 |
| AAV) | |
| AAAV (Avian | 2925 |
| AAV) | |
| AAAV (Avian | 2926 |
| AAV) | |
| AAAV (Avian | 2927 |
| AAV) | |
| AAAV (Avian | 2928 |
| AAV) | |
| AAAV (Avian | 2929 |
| AAV) | |
| AAAV (Avian | 2930 |
| AAV) | |
| AAAV (Avian | 2931 |
| AAV) | |
| AAAV (Avian | 2932 |
| AAV) | |
| AAAV (Avian | 2933 |
| AAV) | |
| AAV Shuffle | 2934 |
| 100-1 | |
| AAV Shuffle | 2935 |
| 100-1 | |
| AAV Shuffle | 2936 |
| 100-2 | |
| AAV Shuffle | 2937 |
| 100-2 | |
| AAV Shuffle | 2938 |
| 100-3 | |
| AAV Shuffle | 2939 |
| 100-3 | |
| AAV Shuffle | 2940 |
| 100-7 | |
| AAV Shuffle | 2941 |
| 100-7 | |
| AAV Shuffle 10- | 2942 |
| 2 | |
| AAV Shuffle 10- | 2943 |
| 2 | |
| AAV Shuffle 10- | 2944 |
| 6 | |
| AAV Shuffle 10- | 2945 |
| 6 | |
| AAV Shuffle 10- | 2946 |
| 8 | |
| AAV Shuffle 10- | 2947 |
| 8 | |
| AAVSM 100-10 | 2948 |
| AAVSM 100-10 | 2949 |
| AAV SM 100-3 | 2950 |
| AAV SM 100-3 | 2951 |
| AAV SM 10-1 | 2952 |
| AAV SM 10-1 | 2953 |
| AAVSM 10-2 | 2954 |
| AAVSM 10-2 | 2955 |
| AAV SM 10-8 | 2956 |
| AAV SM 10-8 | 2957 |
| AAVF1/HSC1 | 2958 |
| AAVF2/HSC2 | 2959 |
| AAVF3/HSC3 | 2960 |
| AAVF4/HSC4 | 2961 |
| AAVF5/HSC5 | 2962 |
| AAVF6/HSC6 | 2963 |
| AAVF7/HSC7 | 2964 |
| AAVF8/HSC8 | 2965 |
| AAVF9/HSC9 | 2966 |
| AAVF1 1/HSC1 | 2967 |
| 1 | |
| AAVF12/HSC12 | 2968 |
| AAVF13/HSC13 | 2969 |
| AAVF14/HSC14 | 2970 |
| AAVF15/HSC15 | 2971 |
| AAVF16/HSC16 | 2972 |
| AAVF17/HSC17 | 2973 |
| AAVF1/HSC1 | 2974 |
| AAVF2/HSC2 | 2975 |
| AAVF3/HSC3 | 2976 |
| AAVF4/HSC4 | 2977 |
| AAVF5/HSC5 | 2978 |
| AAVF6/HSC6 | 2979 |
| AAVF7/HSC7 | 2980 |
| AAVF8/HSC8 | 2981 |
| AAVF9/HSC9 | 2982 |
| AAVF1 1/HSC1 | 2983 |
| 1 | |
| AAVF12/HSC12 | 2984 |
| AAVF13/HSC13 | 2985 |
| AAVF14/HSC14 | 2986 |
| AAVF15/HSC15 | 2987 |
| AAVF16/HSC16 | 2988 |
| AAVF17/HSC17 | 2989 |
| AAVCBr-E1 | 2990 |
| AAVCBr-E2 | 2991 |
| AAVCBr-E3 | 2992 |
| AAVCBr-E4 | 2993 |
| AAVCBr-E5 | 2994 |
| AAVCBr-e5 | 2995 |
| AAVCBr-E6 | 2996 |
| AAVCBr-E7 | 2997 |
| AAVCBr-E8 | 2998 |
| AAVCLv-D1 | 2999 |
| AAVCLv-D2 | 3000 |
| AAVCLv-D3 | 3001 |
| AAVCLv-D4 | 3002 |
| AAVCLv-D5 | 3003 |
| AAVCLv-D6 | 3004 |
| AAVCLv-D7 | 3005 |
| AAVCLv-D8 | 3006 |
| AAVCLv-E1 | 3007 |
| AAVCLv-R1 | 3008 |
| AAVCLv-R2 | 3009 |
| AAVCLv-R3 | 3010 |
| AAVCLv-R4 | 3011 |
| AAVCLv-R5 | 3012 |
| AAVCLv-R6 | 3013 |
| AAVCLv-R7 | 3014 |
| AAVCLv-R8 | 3015 |
| AAVCLv-R9 | 3016 |
| AAVCLg-F1 | 3017 |
| AAVCLg-F2 | 3018 |
| AAVCLg-F3 | 3019 |
| AAVCLg-F4 | 3020 |
| AAVCLg-F5 | 3021 |
| AAVCLg-F6 | 3022 |
| AAVCLg-F7 | 3023 |
| AAVCLg-F8 | 3024 |
| AAVCSp-1 | 3025 |
| AAVCSp-10 | 3026 |
| AAVCSp-11 | 3027 |
| AAVCSp-2 | 3028 |
| AAVCSp-3 | 3029 |
| AAVCSp-4 | 3030 |
| AAVCSp-6 | 3031 |
| AAVCSp-7 | 3032 |
| AAVCSp-8 | 3033 |
| AAVCSp-9 | 3034 |
| AAVCHt-2 | 3035 |
| AAVCHt-3 | 3036 |
| AAVCKd-1 | 3037 |
| AAVCKd-10 | 3038 |
| AAVCKd-2 | 3039 |
| AAVCKd-3 | 3040 |
| AAVCKd-4 | 3041 |
| AAVCKd-6 | 3042 |
| AAVCKd-7 | 3043 |
| AAVCKd-8 | 3044 |
| AAVCLv-1 | 3045 |
| AAVCLv-12 | 3046 |
| AAVCLv-13 | 3047 |
| AAVCLv-2 | 3048 |
| AAVCLv-3 | 3049 |
| AAVCLv-4 | 3050 |
| AAVCLv-6 | 3051 |
| AAVCLv-8 | 3052 |
| AAVCKd-B1 | 3053 |
| AAVCKd-B2 | 3054 |
| AAVCKd-B3 | 3055 |
| AAVCKd-B4 | 3056 |
| AAVCKd-B5 | 3057 |
| AAVCKd-B6 | 3058 |
| AAVCKd-B7 | 3059 |
| AAVCKd-B8 | 3060 |
| AAVCKd-H1 | 3061 |
| AAVCKd-H2 | 3062 |
| AAVCKd-H3 | 3063 |
| AAVCKd-H4 | 3064 |
| AAVCKd-H5 | 3065 |
| AAVCKd-H6 | 3066 |
| AAV CHt-1 | 3067 |
| AAVCLvl-1 | 3068 |
| AAVCLv1-2 | 3069 |
| AAVCLv1-3 | 3070 |
| AAVCLv1-4 | 3071 |
| AAVC1v1-7 | 3072 |
| AAVC1v1-8 | 3073 |
| AAVC1v1-9 | 3074 |
| AAVC1v1-10 | 3075 |
| AAV.VR-355 | 3076 |
| AAV.hu.48R3 | 3077 |
| AAVCBr-E1 | 3078 |
| AAVCBr-E2 | 3079 |
| AAVCBr-E3 | 3080 |
| AAVCBr-E4 | 3081 |
| AAVCBr-E5 | 3082 |
| AAVCBr-e5 | 3083 |
| AAVCBr-E6 | 3084 |
| AAVCBr-E7 | 3085 |
| AAVCBr-E8 | 3086 |
| AAVCLv-D1 | 3087 |
| AAVCLv-D2 | 3088 |
| AAVCLv-D3 | 3089 |
| AAVCLv-D4 | 3090 |
| AAVCLv-D5 | 3091 |
| AAVCLv-D6 | 3092 |
| AAVCLv-D7 | 3093 |
| AAVCLv-D8 | 3094 |
| AAVCLv-E1 | 3095 |
| AAVCLv-R1 | 3096 |
| AAVCLv-R2 | 3097 |
| AAVCLv-R3 | 3098 |
| AAVCLv-R4 | 3099 |
| AAVCLv-R5 | 3100 |
| AAVCLv-R6 | 3101 |
| AAVCLv-R7 | 3102 |
| AAVCLv-R8 | 3103 |
| AAVCLv-R9 | 3104 |
| AAVCLg-F1 | 3105 |
| AAVCLg-F2 | 3106 |
| AAVCLg-F3 | 3107 |
| AAVCLg-F4 | 3108 |
| AAVCLg-F5 | 3109 |
| AAVCLg-F6 | 3110 |
| AAVCLg-F7 | 3111 |
| AAVCLg-F8 | 3112 |
| AAVCSp-1 | 3113 |
| AAVCSp-10 | 3114 |
| AAVCSp-11 | 3115 |
| AAVCSp-2 | 3116 |
| AAVCSp-3 | 3117 |
| AAVCSp-4 | 3118 |
| AAVCSp-6 | 3119 |
| AAVCSp-7 | 3120 |
| AAVCSp-8 | 3121 |
| AAVCSp-9 | 3122 |
| AAVCHt-2 | 3123 |
| AAVCHt-3 | 3124 |
| AAVCKd-1 | 3125 |
| AAVCKd-10 | 3126 |
| AAVCKd-2 | 3127 |
| AAVCKd-3 | 3128 |
| AAVCKd-4 | 3129 |
| AAVCKd-6 | 3130 |
| AAVCKd-7 | 3131 |
| AAVCKd-8 | 3132 |
| AAVCLv-1 | 3133 |
| AAVCLv-12 | 3134 |
| AAVCLv-13 | 3135 |
| AAVCLv-2 | 3136 |
| AAVCLv-3 | 3137 |
| AAVCLv-4 | 3138 |
| AAVCLv-6 | 3139 |
| AAVCLv-8 | 3140 |
| AAVCKd-B1 | 3141 |
| AAVCKd-B2 | 3142 |
| AAVCKd-B3 | 3143 |
| AAVCKd-B4 | 3144 |
| AAVCKd-B5 | 3145 |
| AAVCKd-B6 | 3146 |
| AAVCKd-B7 | 3147 |
| AAVCKd-B8 | 3148 |
| AAVCKd-H1 | 3149 |
| AAVCKd-H2 | 3150 |
| AAVCKd-H3 | 3151 |
| AAVCKd-H4 | 3152 |
| AAVCKd-H5 | 3153 |
| AAVCKd-H6 | 3154 |
| AAV CHt-1 | 3155 |
| AAVCHt-P2 | 3156 |
| AAVCHt-P5 | 3157 |
| AAVCHt-P9 | 3158 |
| AAVCBr-7.1 | 3159 |
| AAVCBr-7.2 | 3160 |
| AAVCBr-7.3 | 3161 |
| AAVCBr-7.4 | 3162 |
| AAVCBr-7.5 | 3163 |
| AAVCBr-7.7 | 3164 |
| AAVCBr-7.8 | 3165 |
| AAV CBr-7.10 | 3166 |
| AAVCKd-N3 | 3167 |
| AAVCKd-N4 | 3168 |
| AAVCKd-N9 | 3169 |
| AAVCLv-L4 | 3170 |
| AAVCLv-L5 | 3171 |
| AAVCLv-L6 | 3172 |
| AAVCLv-K1 | 3173 |
| AAVCLv-K3 | 3174 |
| AAVCLv-K6 | 3175 |
| AAVCLv-M1 | 3176 |
| AAVCLv-M11 | 3177 |
| AAVCLv-M2 | 3178 |
| AAVCLv-M5 | 3179 |
| AAVCLv-M6 | 3180 |
| AAVCLv-M7 | 3181 |
| AAVCLv-M8 | 3182 |
| AAVCLv-M9 | 3183 |
| AAVCHt-P1 | 3184 |
| AAVCHt-P6 | 3185 |
| AAVCHt-P8 | 3186 |
| AAVCHt-6.1 | 3187 |
| AAV CHt-6.10 | 3188 |
| AAVCHt-6.5 | 3189 |
| AAVCHt-6.6 | 3190 |
| AAVCHt-6.7 | 3191 |
| AAVCHt-6.8 | 3192 |
| AAVCSp-8.10 | 3193 |
| AAVCSp-8.2 | 3194 |
| AAVCSp-8.4 | 3195 |
| AAVCSp-8.5 | 3196 |
| AAVCSp-8.6 | 3197 |
| AAVCSp-8.7 | 3198 |
| AAVCSp-8.8 | 3199 |
| AAVCSp-8.9 | 3200 |
| AAV CBr-B7.3 | 3201 |
| AAV CBr-B7.4 | 3202 |
| AAV3B | 3203 |
| AAV4 | 3204 |
| AAV5 | 3205 |
| AAVCHt-P2 | 3206 |
| AAVCHt-P5 | 3207 |
| AAVCHt-P9 | 3208 |
| AAVCBr-7.1 | 3209 |
| AAVCBr-7.2 | 3210 |
| AAVCBr-7.3 | 3211 |
| AAVCBr-7.4 | 3212 |
| AAVCBr-7.5 | 3213 |
| AAVCBr-7.7 | 3214 |
| AAVCBr-7.8 | 3215 |
| AAV CBr-7.10 | 3216 |
| AAVCKd-N3 | 3217 |
| AAVCKd-N4 | 3218 |
| AAVCKd-N9 | 3219 |
| AAVCLv-L4 | 3220 |
| AAVCLv-L5 | 3221 |
| AAVCLv-L6 | 3222 |
| AAVCLv-K1 | 3223 |
| AAVCLv-K3 | 3224 |
| AAVCLv-K6 | 3225 |
| AAVCLv-M1 | 3226 |
| AAVCLv-M11 | 3227 |
| AAVCLv-M2 | 3228 |
| AAVCLv-M5 | 3229 |
| AAVCLv-M6 | 3230 |
| AAVCLv-M7 | 3231 |
| AAVCLv-M8 | 3232 |
| AAVCLv-M9 | 3233 |
| AAVCHt-P1 | 3234 |
| AAVCHt-P6 | 3235 |
| AAVCHt-P8 | 3236 |
| AAVCHt-6.1 | 3237 |
| AAV CHt-6.10 | 3238 |
| AAVCHt-6.5 | 3239 |
| AAVCHt-6.6 | 3240 |
| AAVCHt-6.7 | 3241 |
| AAVCHt-6.8 | 3242 |
| AAVCSp-8.10 | 3243 |
| AAVCSp-8.2 | 3244 |
| AAVCSp-8.4 | 3245 |
| AAVCSp-8.5 | 3246 |
| AAVCSp-8.6 | 3247 |
| AAV CSp-8.7 | 3248 |
| AAVCSp-8.8 | 3249 |
| AAVCSp-8.9 | 3250 |
| AAV CBr-B7.3 | 3251 |
| AAV CBr-B7.4 | 3252 |
| AAV3B | 3253 |
| AAV4 | 3254 |
| AAV5 | 3255 |
| GPV | 3256 |
| B19 | 3257 |
| MVM | 3258 |
| FPV | 3259 |
| CPV | 3260 |
| AAV6 | 3261 |
| AAV6 | 3262 |
| AAV2 | 3263 |
| ShH1O | 3264 |
| ShH13 | 3265 |
| ShH1O | 3266 |
| ShH1O | 3267 |
| ShH1O | 3268 |
| ShH1O | 3269 |
| ShH1O | 3270 |
| rh74 | 3271 |
| rh74 | 3272 |
| AAV8 | 3273 |
| rh74 | 3274 |
| rh74 (RHM4-1) | 3275 |
| rh74 (RHM15-1) | 3276 |
| rh74 (RHM15-2) | 3277 |
| rh74 (RHM15- | 3278 |
| 3/RHM15-5) | |
| rh74 (RHM15-4) | 3279 |
| rh74 (RHM15-6) | 3280 |
| rh74 (RHM4-1) | 3281 |
| rh74 (RHM15-1) | 3282 |
| rh74 (RHM15-2) | 3283 |
| rh74 (RHM15- | 3284 |
| 3/RHM15-5) | |
| rh74 (RHM15-4) | 3285 |
| rh74 (RHM15-6) | 3286 |
| AAV2 (comprising lung | 3287 |
| specific polypeptide) | |
| AAV2 (comprising lung | 3288 |
| specific polypeptide) | |
| Anc80 | 3289 |
| Anc80 | 3290 |
| Anc81 | 3291 |
| Anc80 | 3292 |
| Anc82 | 3293 |
| Anc82 | 3294 |
| Anc83 | 3295 |
| Anc83 | 3296 |
| Anc84 | 3297 |
| Anc84 | 3298 |
| Anc94 | 3299 |
| Anc94 | 3300 |
| Anc113 | 3301 |
| Anc113 | 3302 |
| Anc126 | 3303 |
| Anc126 | 3304 |
| Anc127 | 3305 |
| Anc127 | 3306 |
| Anc80L27 | 3307 |
| Anc80L59 | 3308 |
| Anc80L60 | 3309 |
| Anc80L62 | 3310 |
| Anc80L65 | 3311 |
| Anc80L33 | 3312 |
| Anc80L36 | 3313 |
| Anc80L44 | 3314 |
| Anc80L1 | 3315 |
| Anc80L1 | 3316 |
| AAV-X1 | 3317 |
| AAV-X1b | 3318 |
| AAV-X5 | 3319 |
| AAV-X19 | 3320 |
| AAV-X21 | 3321 |
| AAV-X22 | 3322 |
| AAV-X23 | 3323 |
| AAV-X24 | 3324 |
| AAV-X25 | 3325 |
| AAV-X26 | 3326 |
| AAV-X1 | 3327 |
| AAV-X1b | 3328 |
| AAV-X5 | 3329 |
| AAV-X19 | 3330 |
| AAV-X21 | 3331 |
| AAV-X22 | 3332 |
| AAV-X23 | 3333 |
| AAV-X24 | 3334 |
| AAV-X25 | 3335 |
| AAV-X26 | 3336 |
| AAVrh8 | 3337 |
| AAVrh8VP2FC5 | 3338 |
| AAVrh8VP2FC44 | 3339 |
| AAVrh8VP2ApoB100 | 3340 |
| AAVrh8VP2RVG | 3341 |
| AAVrh8VP2Angiopep-2 | 3342 |
| VP2 | |
| AAV9.47VP1.3 | 3343 |
| AAV9.47VP2ICAMg3 | 3344 |
| AAV9.47VP2RVG | 3345 |
| AAV9.47VP2Angiopep- | 3346 |
| 2 | |
| AAV9.47VP2A-string | 3347 |
| AAVrh8VP2FC5 VP2 | 3348 |
| AAVrh8VP2FC44 VP2 | 3349 |
| AAVrh8VP2ApoB100 | 3350 |
| VP2 | |
| AAVrh8VP2RVG VP2 | 3351 |
| AAVrh8VP2Angiopep-2 | 3352 |
| VP2 | |
| AAV9.47VP2ICAMg3 | 3353 |
| VP2 | |
| AAV9.47VP2RVG VP2 | 3354 |
| AAV9.47VP2Angiopep- | 3355 |
| 2 VP2 | |
| AAV9.47VP2A- | 3356 |
| string VP2 | |
| rAAV-B1 | 3357 |
| rAAV-B2 | 3358 |
| rAAV-B3 | 3359 |
| rAAV-B4 | 3360 |
| rAAV-B1 | 3361 |
| rAAV-B2 | 3362 |
| rAAV-B3 | 3363 |
| rAAV-B4 | 3364 |
| rAAV-L1 | 3365 |
| rAAV-L2 | 3366 |
| rAAV-L3 | 3367 |
| rAAV-L4 | 3368 |
| rAAV-L1 | 3369 |
| rAAV-L2 | 3370 |
| rAAV-L3 | 3371 |
| rAAV-L4 | 3372 |
| AAV9 | 3373 |
| rAAV | 3374 |
| rAAV | 3375 |
| rAAV | 3376 |
| rAAV | 3377 |
| rAAV | 3378 |
| rAAV | 3379 |
| rAAV | 3380 |
| rAAV | 3381 |
| rAAV | 3382 |
| rAAV | 3383 |
| rAAV | 3384 |
| rAAV | 3385 |
| rAAV | 3386 |
| rAAV | 3387 |
| rAAV | 3388 |
| rAAV | 3389 |
| rAAV | 3390 |
| rAAV | 3391 |
| rAAV | 3392 |
| rAAV | 3393 |
| rAAV | 3394 |
| rAAV | 3395 |
| rAAV | 3396 |
| rAAV | 3397 |
| rAAV | 3398 |
| rAAV | 3399 |
| rAAV | 3400 |
| rAAV | 3401 |
| rAAV | 3402 |
| rAAV | 3403 |
| rAAV | 3404 |
| rAAV | 3405 |
| rAAV | 3406 |
| rAAV | 3407 |
| rAAV | 3408 |
| rAAV | 3409 |
| rAAV | 3410 |
| rAAV | 3411 |
| rAAV | 3412 |
| rAAV | 3413 |
| rAAV | 3414 |
| rAAV | 3415 |
| rAAV | 3416 |
| rAAV | 3417 |
| rAAV | 3418 |
| rAAV | 3419 |
| rAAV | 3420 |
| rAAV | 3421 |
| rAAV | 3422 |
| rAAV | 3423 |
| rAAV | 3424 |
| rAAV | 3425 |
| rAAV | 3426 |
| rAAV | 3427 |
| rAAV | 3428 |
| rAAV | 3429 |
| rAAV | 3430 |
| rAAV | 3431 |
| rAAV | 3432 |
| rAAV | 3433 |
| rAAV | 3434 |
| rAAV | 3435 |
| rAAV | 3436 |
| rAAV | 3437 |
| rAAV | 3438 |
| rAAV | 3439 |
| rAAV | 3440 |
| rAAV | 3441 |
| rAAV | 3442 |
| rAAV | 3443 |
| rAAV | 3444 |
| rAAV | 3445 |
| rAAV | 3446 |
| rAAV | 3447 |
| rAAV | 3448 |
| rAAV | 3449 |
| rAAV | 3450 |
| rAAV | 3451 |
| rAAV | 3452 |
| rAAV | 3453 |
| rAAV | 3454 |
| rAAV | 3455 |
| rAAV | 3456 |
| rAAV | 3457 |
| rAAV | 3458 |
| rAAV | 3459 |
| rAAV | 3460 |
| rAAV | 3461 |
| rAAV | 3462 |
| rAAV | 3463 |
| rAAV | 3464 |
| rAAV | 3465 |
| rAAV | 3466 |
| rAAV | 3467 |
| rAAV | 3468 |
| rAAV | 3469 |
| rAAV | 3470 |
| rAAV | 3471 |
| rAAV | 3472 |
| rAAV | 3473 |
| rAAV | 3474 |
| rAAV | 3475 |
| rAAV | 3476 |
| rAAV | 3477 |
| rAAV | 3478 |
| rAAV | 3479 |
| rAAV | 3480 |
| rAAV | 3481 |
| rAAV | 3482 |
| rAAV | 3483 |
| rAAV | 3484 |
| rAAV | 3485 |
| rAAV | 3486 |
| rAAV | 3487 |
| rAAV | 3488 |
| rAAV | 3489 |
| rAAV | 3490 |
| rAAV | 3491 |
| rAAV | 3492 |
| rAAV | 3493 |
| rAAV | 3494 |
| rAAV | 3495 |
| rAAV | 3496 |
| rAAV | 3497 |
| rAAV | 3498 |
| rAAV | 3499 |
| rAAV | 3500 |
| rAAV | 3501 |
| AAV8E532K | 3502 |
| AAV8E532K | 3503 |
| rAAV4 | 3504 |
| rAAV4 | 3505 |
| rAAV4 | 3506 |
| rAAV4 | 3507 |
| rAAV4 | 3508 |
| rAAV4 | 3509 |
| rAAV4 | 3510 |
| rAAV4 | 3511 |
| rAAV4 | 3512 |
| rAAV4 | 3513 |
| rAAV4 | 3514 |
| rAAV4 | 3515 |
| rAAV4 | 3516 |
| rAAV4 | 3517 |
| rAAV4 | 3518 |
| rAAV4 | 3519 |
| rAAV4 | 3520 |
| rAAV4 | 3521 |
| rAAV4 | 3522 |
| rAAV4 | 3523 |
| AAV11 | 3524 |
| AAV12 | 3525 |
| rh32 | 3526 |
| rh33 | 3527 |
| rh34 | 3528 |
| rAAV4 | 3529 |
| rAAV4 | 3530 |
| rAAV4 | 3531 |
| rAAV4 | 3532 |
| rAAV4 | 3533 |
| rAAV4 | 3534 |
| AAV2/8 | 3535 |
| AAV2/8 | 3536 |
| ancestral AAV | 3537 |
| ancestral AAV variant | 3538 |
| C4 | |
| ancestral AAV variant | 3539 |
| C7 | |
| ancestral AAV variant | 3540 |
| G4 | |
| consensus amino acid | 3541 |
| sequence of ancestral | |
| AAV variants, C4, C7 | |
| and G4 | |
| consensus amino acid | 3542 |
| sequence of ancestral | |
| AAV variants, C4 and | |
| C7 | |
| AAVS (with an AAV2 | 3543 |
| phospholipase | |
| domain) | |
| AAVVR-942n | 3544 |
| AAVS-A (M569V) | 3545 |
| AAVS-A (M569V) | 3546 |
| AAVS-A (Y585V) | 3547 |
| AAVS-A (Y585V) | 3548 |
| AAVS-A (L587T) | 3549 |
| AAVS-A (L587T) | 3550 |
| AAVS-A | 3551 |
| (Y585V/L587T) | |
| AAVS-A | 3552 |
| (Y585V/L587T) | |
| AAV5-B (D652A) | 3553 |
| AAV5-B (D652A) | 3554 |
| AAV5-B (T362M) | 3555 |
| AAV5-B (T362M) | 3556 |
| AAV5-B (Q359D) | 3557 |
| AAV5-B (Q359D) | 3558 |
| AAV5-B (E350Q) | 3559 |
| AAV5-B (E350Q) | 3560 |
| AAV5-B (P533S) | 3561 |
| AAV5-B (P533S) | 3562 |
| AAV5-B (P533G) | 3563 |
| AAV5-B (P533G) | 3564 |
| AAVS-mutation in loop | 3565 |
| V11 | |
| AAVS-mutation in loop | 3566 |
| V11 | |
| AAVS | 3567 |
| Mut A (LK03/AAVS) | 3568 |
| Mut B (LK03/AAVS) | 3569 |
| Mut C (AAV8/AAV3B) | 3570 |
| MutD (AAV5/AAV3B) | 3571 |
| Mut E (AAV8/AAV3B) | 3572 |
| Mut F (AAV3B/AAV8) | 3573 |
| AAV44.9 | 3574 |
| AAV44.9 | 3575 |
| AAVrh8 | 3576 |
| AAV44.9 (S470N) | 3577 |
| rh74 VP1 | 3578 |
| AAV-LK03 (L125I) | 3579 |
| AAV3B (S663V + T492V) | 3580 |
| Anc80 | 3581 |
| Anc80 | 3582 |
| Anc81 | 3583 |
| Anc81 | 3584 |
| Anc82 | 3585 |
| Anc82 | 3586 |
| Anc83 | 3587 |
| Anc83 | 3588 |
| Anc84 | 3589 |
| Anc84 | 3590 |
| Anc94 | 3591 |
| Anc94 | 3592 |
| Anc113 | 3593 |
| Anc113 | 3594 |
| Anc126 | 3595 |
| Anc126 | 3596 |
| Anc127 | 3597 |
| Anc127 | 3598 |
| Anc80L27 | 3599 |
| Anc80L59 | 3600 |
| Anc80L60 | 3601 |
| Anc80L62 | 3602 |
| Anc80L65 | 3603 |
| Anc80L33 | 3604 |
| Anc80L36 | 3605 |
| Anc80L44 | 3606 |
| Anc80L1 | 3607 |
| Anc80L1 | 3608 |
| AAVrh1O | 3609 |
| Anc11O | 3610 |
| Anc11O | 3611 |
| AAVrh32.33 | 3612 |
| AAVrh74 | 3613 |
| AAV2 | 3614 |
| AAV2 | 3615 |
| AAV2 | 3616 |
| PaNo-like vims | 3617 |
| PaNo-like vims | 3618 |
| PaNo-like vims | 3619 |
| PaNo-like vims | 3620 |
| PaNo-like vims | 3621 |
| PaNo-like vims | 3622 |
| AAVrh.10 | 3623 |
| AAVrh.10 | 3624 |
| AAV2tYF | 3625 |
| AAV-SPK | 3626 |
| AAV2.5 | 3627 |
| AAV1.1 | 3628 |
| AAV6.1 | 3629 |
| AAV6.3.1 | 3630 |
| AAV2i8 | 3631 |
| AAV2i8 | 3632 |
| ttAAV | 3633 |
| ttAAV-S312N | 3634 |
| ttAAV-S312N | 3635 |
| AAV6 (Y705, Y731, and | 3636 |
| T492) | |
| AAV2 | 3637 |
| AAV2 | 3638 |

### AAV Production

[0099] The AAV vectors described herein may be produced using an AAV production cell line, such as a mammalian cell line (e.g., HEK293) or an insect cell line (e.g., Sf9). The AAV vectors may be produced using known methods for AAV production, including the helper-free transfection method and the baculovirus production method.

[0100] In some embodiments, an AAV viral vector of the disclosure is produced using a helper-free transfection method. The AAV expression cassette may be introduced into an AAV production cell line, along with Rep and Cap sequences and required “helper” sequences comprising genes from adenovirus. These helper sequences (E4, E2a and VA genes) mediate AAV replication. According to some embodiments, a transfer plasmid (comprising the AAV expression cassette), a Rep/Cap plasmid, and a helper plasmid (comprising E4, E2a, and VA) are transfected into viral production cells (e.g., HEK293 cells), to produce infectious AAV particles. Rep/Cap and the adenovirus helper genes may also be combined into a single plasmid.

[0101] In some embodiments, an AAV viral vector is produced using a baculovirus production method. In some embodiments, AAV production cells (e.g., Sf9 cells or derivatives thereof) are infected with one, two, or three baculovirus particles. In some embodiments, a first baculovirus particle comprises a sequence encoding the AAV expression cassette. In some embodiments, a second baculovirus particle comprises a sequence encoding AAV Rep and Cap genes.

[0102] AAV particles may be collected from AAV producer cell lysate, or from the tissue culture media without lysing the cells. The AAV particles may then be further purified, formulated for clinical use, and/or sterile filtered.

### AAV9-CK8e-spCas9

[0103] The disclosure provides an AAV vector of serotype 9 (AAV9) having 5′ and 3′ ITR sequences derived from an AAV of serotype 2 (AAV2), flanking a human codon optimized sequence encoding Streptococcus pyogenes (S. pyogenes) Cas9 (SpCas9) under the control of a truncated M-creatine kinase regulatory cassette (CK8e). Optionally, the human codon optimized sequence encoding SpCas9 is further flanked by two nuclear localization sequences (NLS), at the 5′ end, an SV40 NLS sequence and at the 3′ end, a nucleoplasm in NLS. Optionally, a sequence encoding a polyadenylation signal (polyA) or a miniature polyA is positioned 3′ of the nucleoplasmin NLS.

[0104] In some embodiments, the AAV9 vector comprises from 5′ to 3′, a sequence encoding an AAV2 5′ ITR, a sequence encoding a truncated M-creatine kinase regulatory cassette (CK8e), a human codon optimized sequence encoding SpCas9, and a sequence encoding an AAV2 3′ ITR.

[0105] In some embodiments, the AAV9 vector comprises from 5′ to 3′, a sequence encoding an AAV2 5′ ITR, a sequence encoding a truncated M-creatine kinase regulatory cassette (CK8e), a human codon optimized sequence encoding SpCas9, a sequence encoding a mini polyA and a sequence encoding an AAV2 3′ ITR.

[0106] In some embodiments, the AAV9 vector comprises from 5′ to 3′, a sequence encoding an AAV2 5′ ITR, an SV40 NLS, a sequence encoding a truncated M-creatine kinase regulatory cassette (CK8e), a human codon optimized sequence encoding SpCas9, a nucleoplasmin NLS, a sequence encoding a mini polyA and a sequence encoding an AAV2 3′ ITR.

[0107] In some embodiments, the AAV2 5′ ITR comprises the sequence of

(SEQ ID NO: 27)

| | |
|---|---|
| 1 | TTGGCCACTC CCTCTCTGCG CGCTCGCTCG CTCACTGAGG |
| | CCGGGCGACC AAAGGTCGCC |
| 61 | CGACGCCCGG GCTTTGCCCG GGCGGCCTCA GTGAGCGAGC |
| | GAGCGCGCAG AGAGGGAGTG |
| 121 | GCCAACTCCA TCACTAGGGG TTCCT. |

[0108] In some embodiments, the AAV2 3′ ITR comprises the sequence of

(SEQ ID NO: 28)

| | |
|---|---|
| 1 | AGGAACCCCT AGTGATGGAG TTGGCCACTC CCTCTCTGCG |
| | CGCTCGCTCG CTCACTGAGG |
| 61 | CCGCCCGGGC AAAGGCCGGG CGTCGGGCGA CCTTTGGTCG |
| | CCCGGCCTCA GTGAGCGAGC |
| 121 | GAGCGCGGAG AGAGGGAGTG GCCAA. |

[0109] In some embodiments, the SV40 NLS comprises the sequence of

(SEQ ID NO: 2363)
ccaaagaagaagcggaaggtc.

[0110] In some embodiments, the nucleoplasmin NLS comprises the sequence of

(SEQ ID NO: 2364)
aaaaggccggcggccacgaaaaaggccggccaggcaaaaaagaaaaag.

[0111] In some embodiments, the sequence encoding the truncated M-creatine kinase regulatory cassette (CK8e) comprises the sequence of

(SEQ ID NO: 19)

| | |
|---|---|
| 1 | TGCCCATGTA AGGAGGCAAG GCCTGGGGAC ACCCGAGATG |
| | CCTGGTTATA ATTAACCCAG |
| 61 | ACATGTGGCT GCCCCCCCCC CCCCAACACC TGCTGCCTCT |
| | AAAAATAACC CTGCATGCCA |
| 121 | TGTTCCCGGC GAAGGGCCAG CTGTCCCCCG CCAGCTAGAC |
| | TCAGCACTTA GTTTAGGAAC |
| 181 | CAGTGAGCAA GTCAGCCCTT GGGGCAGCCC ATACAAGGCC |
| | ATGGGGCTGG GCAAGCTGCA |
| 241 | CGCCTGGGTC CGGGGTGGGC ACGGTGCCCG GGCAACGAGC |
| | TGAAAGCTCA TCTGCTCTCA |
| 301 | GGGGCCCCTC CCTGGGGACA GCCCCTCCTG GCTAGTCACA |
| | CCCTGTAGGC TCCTCTATAT |
| 361 | AACCCAGGGG CACAGGGGCT GCCCTCATTC TACCACCACC |
| | TCCACAGCAC AGACAGACAC |
| 421 | TCAGGAGCCA GCCAGC. |

[0112] In some embodiments, the human codon optimized sequence encoding SpCas9 comprises the sequence of

(SEQ ID NO: 2365)

| | |
|---|---|
| 1 | gacaagaagt acagcatcgg cctggacatc ggcaccaact |
| | ctgtgggctg ggccgtgatc |
| 61 | accgacgagt acaaggtgcc cagcaagaaa ttcaaggtgc |
| | tgggcaacac cgaccggcac |
| 121 | agcatcaaga agaacctgat cggagccctg ctgttcgaca |
| | gcggcgaaac agccgaggcc |
| 181 | acccggctga agagaaccgc cagaagaaga tacaccagac |
| | ggaagaaccg gatctgctat |
| 241 | ctgcaagaga tcttcagcaa cgagatggcc aaggtggacg |
| | acagcttctt ccacagactg |
| 301 | gaagagtcct tcctggtgga agaggataag aagcacgagc |
| | ggcaccccat cttcggcaac |
| 361 | atcgtggacg aggtggccta ccacgagaag taccccacca |
| | tctaccacct gagaaagaaa |
| 421 | ctggtggaca gcaccgacaa ggccgacctg cggctgatct |
| | atctggccct ggcccacatg |
| 481 | atcaagttcc ggggccactt cctgatcgag ggcgacctga |
| | accccgacaa cagcgacgtg |
| 541 | gacaagctgt tcatccagct ggtgcagacc tacaaccagc |
| | tgttcgagga aaaccccatc |
| 601 | aacgccagcg gcgtggacgc caaggccatc ctgtctgcca |
| | gactgagcaa gagcagacgg |
| 661 | ctggaaaatc tgatcgccca gctgcccggc gagaagaaga |
| | atggcctgtt cggaaacctg |
| 721 | attgccctga gcctgggcct gacccccaac ttcaagagca |
| | acttcgacct ggccgaggat |
| 781 | gccaaactgc agctgagcaa ggacacctac gacgacgacc |
| | tggacaacct gctggcccag |
| 841 | atcggcgacc agtacgccga cctgtttctg gccgccaaga |
| | acctgtccga cgccatcctg |
| 901 | ctgagcgaca tcctgagagt gaacaccgag atcaccaagg |
| | cccccctgag cgcctctatg |
| 961 | atcaagagat acgacgagca ccaccaggac ctgaccctgc |
| | tgaaagctct cgtgcggcag |
| 1021 | cagctgcctg agaagtacaa agagattttc ttcgaccaga |
| | gcaagaacgg ctacgccggc |
| 1081 | tacattgacg gcggagccag ccaggaagag ttctacaagt |
| | tcatcaagcc catcctggaa |
| 1141 | aagatggacg gcaccgagga actgctcgtg aagctgaaca |
| | gagaggacct gctgcggaag |
| 1201 | cagcggacct tcgacaacgg cagcatcccc caccagatcc |
| | acctgggaga gctgcacgcc |
| 1261 | attctgcggc ggcaggaaga tttttaccca ttcctgaagg |
| | acaaccggga aaagatcgag |
| 1321 | aagatcctga ccttccgcat cccctactac gtgggccctc |
| | tggccagggg aaacagcaga |
| 1381 | ttcgcctgga tgaccagaaa gagcgaggaa accatcaccc |
| | cctggaactt cgaggaagtg |
| 1441 | gtggacaagg gcgcttccgc ccagagcttc atcgagcgga |
| | tgaccaactt cgataagaac |
| 1501 | ctgcccaacg agaaggtgct gcccaagcac agcctgctgt |
| | acgagtactt caccgtgtat |
| 1561 | aacgagctga ccaaagtgaa atacgtgacc gagggaatga |
| | gaaagcccgc cttcctgagc |
| 1621 | ggcgagcaga aaaaggccat cgtggacctg ctgttcaaga |
| | ccaaccggaa agtgaccgtg |
| 1681 | aagcagctga aagaggacta cttcaagaaa atcgagtgct |
| | tcgactccgt ggaaatctcc |
| 1741 | ggcgtggaag atcggttcaa cgcctccctg ggcacatacc |
| | acgatctgct gaaaattatc |
| 1801 | aaggacaagg acttcctgga caatgaggaa aacgaggaca |
| | ttctggaaga tatcgtgctg |
| 1861 | accctgacac tgtttgagga cagagagatg atcgaggaac |
| | ggctgaaaac ctatgcccac |
| 1921 | ctgttcgacg acaaagtgat gaagcagctg aagcggcgga |
| | gatacaccgg ctggggcagg |
| 1981 | ctgagccgga agctgatcaa cggcatccgg gacaagcagt |
| | ccggcaagac aatcctggat |
| 2041 | ttcctgaagt ccgacggctt cgccaacaga aacttcatgc |
| | agctgatcca cgacgacagc |
| 2101 | ctgaccttta aagaggacat ccagaaagcc caggtgtccg |
| | gccagggcga tagcctgcac |
| 2161 | gagcacattg ccaatctggc cggcagcccc gccattaaga |
| | agggcatcct gcagacagtg |
| 2221 | aaggtggtgg acgagctcgt gaaagtgatg ggccggcaca |
| | agcccgagaa catcgtgatc |
| 2281 | gaaatggcca gagagaacca gaccacccag aagggacaga |
| | agaacagccg cgagagaatg |
| 2341 | aagcggatcg aagagggcat caaagagctg ggcagccaga |
| | tcctgaaaga acaccccgtg |
| 2401 | gaaaacaccc agctgcagaa cgagaagctg tacctgtact |
| | acctgcagaa tgggcgggat |
| 2461 | atgtacgtgg accaggaact ggacatcaac cggctgtccg |
| | actacgatgt ggaccatatc |
| 2521 | gtgcctcaga gctttctgaa ggacgactcc atcgacaaca |
| | aggtgctgac cagaagcgac |
| 2581 | aagaaccggg gcaagagcga caacgtgccc tccgaagagg |
| | tcgtgaagaa gatgaagaac |
| 2641 | tactggcggc agctgctgaa cgccaagctg attacccaga |
| | gaaagttcga caatctgacc |
| 2701 | aaggccgaga gaggcggcct gagcgaactg gataaggccg |
| | gcttcatcaa gagacagctg |
| 2761 | gtggaaaccc ggcagatcac aaagcacgtg gcacagatcc |
| | tggactcccg gatgaacact |
| 2821 | aagtacgacg agaatgacaa gctgatccgg gaagtgaaag |
| | tgatcaccct gaagtccaag |
| 2881 | ctggtgtccg atttccggaa ggatttccag ttttacaaag |
| | tgcgcgagat caacaactac |
| 2941 | caccacgccc acgacgccta cctgaacgcc gtcgtgggaa |
| | ccgccctgat caaaaagtac |
| 3001 | cctaagctgg aaagcgagtt cgtgtacggc gactacaagg |
| | tgtacgacgt gcggaagatg |
| 3061 | atcgccaaga gcgagcagga aatcggcaag gctaccgcca |
| | agtacttctt ctacagcaac |
| 3121 | atcatgaact ttttcaagac cgagattacc ctggccaacg |
| | gcgagatccg gaagcggcct |
| 3181 | ctgatcgaga caaacggcga aaccggggag atcgtgtggg |
| | ataagggccg ggattttgcc |
| 3241 | accgtgcgga aagtgctgag catgccccaa gtgaatatcg |
| | tgaaaaagac cgaggtgcag |
| 3301 | acaggcggct tcagcaaaga gtctatcctg cccaagagga |
| | acagcgataa gctgatcgcc |
| 3361 | agaaagaagg actgggaccc taagaagtac ggcggcttcg |
| | acagccccac cgtggcctat |
| 3421 | tctgtgctgg tggtggccaa agtggaadag ggcaagtcca |
| | agaaactgaa gagtgtgaaa |
| 3481 | gagctgctgg ggatcaccat catggaaaga agcagcttcg |
| | agaagaatcc catcgacttt |
| 3541 | ctggaagcca agggctacaa agaagtgaaa aaggacctga |
| | tcatcaagct gcctaagtac |
| 3601 | tccctgttcg agctggaaaa cggccggaag agaatgctgg |
| | cctctgccgg cgaactgcag |
| 3661 | aagggaaacg aactggccct gccctccaaa tatgtgaact |
| | tcctgtacct ggccagccac |
| 3721 | tatgagaagc tgaagggctc ccccgaggat aatgagcaga |
| | aacagctgtt tgtggaacag |
| 3781 | cacaagcact acctggacga gatcatcgag cagatcagcg |
| | agttctccaa gagagtgatc |
| 3841 | ctggccgacg ctaatctgga caaagtgctg tccgcctaca |
| | acaagcaccg ggataagccc |
| 3901 | atcagagagc aggccgagaa tatcatccac ctgtttaccc |
| | tgaccaatct gggagcccct |
| 3961 | gccgccttca agtactttga caccaccatc gaccggaaga |
| | ggtacaccag caccaaagag |
| 4021 | gtgctggacg ccaccctgat ccaccagagc atcaccggcc |
| | tgtacgagac acggatcgac |
| 4081 | ctgtctcagc tgggaggcga c. |

### AAV9-H-sgRNA

[0113] The disclosure provides an AAV vector of serotype 9 (AAV9) having 5′ and 3′ ITR sequences derived from an AAV of serotype 2 (AAV2), flanking triple gRNA construct. In some embodiments, the triple guide construct comprises three single guide RNAs, each under the control of a unique promoter. In some embodiments, the triple guide construct comprises three single guide RNAs, each under the control of a unique RNA polymerase (pol) III promoter. In some embodiments, the triple guide construct comprises three single guide RNAs, each under the control of one of a U6 promoter, an H1 promoter or a 7SK promoter. In some embodiments, the triple guide construct comprises three single guide RNAs, each under the control of, from 5′ to 3′, a U6 promoter, an H1 promoter and a 7SK promoter. In some embodiments, the triple guide construct comprises, from 5′ to 3′, a sequence encoding a U6 promoter region, a sequence encoding a U6 promoter, a sequence encoding a first single guide RNA (sgRNA), a sequence encoding an H1 promoter, a sequence encoding a second sgRNA, a sequence encoding a 7SK promoter, a sequence encoding a third sgRNA. In some embodiments, the triple guide construct comprises, from 5′ to 3′, a sequence encoding a U6 promoter region, a sequence encoding a U6 promoter, a sequence encoding a first spacer sequence, a sequence encoding a first scaffold sequence, a sequence encoding an H1 promoter, a sequence encoding a second spacer sequence, a sequence encoding a second scaffold sequence, a sequence encoding a 7SK promoter, a sequence encoding a third spacer sequence, and a sequence encoding a third scaffold sequence.

[0114] In some embodiments, the sequence encoding the AAV2 5′ ITR lacks a terminal resolution sequence, resulting in the generation of a self-complementary vector.

[0115] In some embodiments, the sequence encoding the first sgRNA, the sequence encoding the second sgRNA, and the sequence encoding the third sgRNA, are identical. In some embodiments, the sequence encoding the first sgRNA, the sequence encoding the second sgRNA, and the sequence encoding the third sgRNA, are not identical.

[0116] In some embodiments, the sequence encoding the first spacer sequence, the sequence encoding the second spacer sequence, and the sequence encoding the third spacer sequence, are identical. In some embodiments, the sequence encoding the first spacer sequence, the sequence encoding the second spacer sequence, and the sequence encoding the third spacer sequence, are not identical.

[0117] In some embodiments, the sequence encoding the first scaffold sequence, the sequence encoding the second scaffold sequence, and the sequence encoding the third scaffold sequence, are identical. In some embodiments, the sequence encoding the first scaffold sequence, the sequence encoding the second scaffold sequence, and the sequence encoding the third scaffold sequence, are not identical. In some embodiments, the scaffold sequence specifically binds Cas9 or SpCas9. In some embodiments, the scaffold sequence comprises an extension of a first tetra loop to increase SpCas9 or Cas9 binding. In some embodiments, the scaffold sequence comprises an extension of at least 5 base pairs to the first tetra loop to increase SpCas9 or Cas9 binding. Alternatively, or in addition, in some embodiments, the scaffold sequence comprises a mutation that removes a transcription stop signal of “TTTT” to disrupt Pol III terminator binding and/or to promote sgRNA transcription. In some embodiments, the scaffold sequence comprises substitution of an adenosine (A) for a thymine (T) within a transcription stop signal of “TTTT” to disrupt Pol III terminator binding and/or to promote sgRNA transcription. In some embodiments, the scaffold sequence comprises the sequence of any one of SEQ ID NOs: 2348 or 2357-2362.

[0118] In some embodiments, the disclosure provides an AAV9 vector comprising, from 5′ to 3′, a sequence encoding an AAV2 5′ ITR sequence, a sequence encoding a U6 promoter region, a sequence encoding a U6 promoter, a sequence encoding a first spacer sequence, a sequence encoding a first scaffold sequence, a sequence encoding an H1 promoter, a sequence encoding a second spacer sequence, a sequence encoding a second scaffold sequence, a sequence encoding a 7SK promoter, a sequence encoding a third spacer sequence, a sequence encoding a third scaffold sequence and a sequence encoding an AAV2 3′ ITR sequence. In some embodiments, the spacer sequence may be referred to as a human sgRNA (H-sgRNA) and the scaffold sequence may be referred to as a sgRNA-constant.

[0119] In some embodiments, the disclosure provides a self-complementary AAV9 (scAAV9) vector comprising, from 5′ to 3′, a sequence encoding an AAV2 5′ ITR sequence lacking a terminal resolution sequence, a sequence encoding a U6 promoter region, a sequence encoding a U6 promoter, a sequence encoding a first spacer sequence, a sequence encoding a first scaffold sequence, a sequence encoding an H1 promoter, a sequence encoding a second spacer sequence, a sequence encoding a second scaffold sequence, a sequence encoding a 7SK promoter, a sequence encoding a third spacer sequence, a sequence encoding a third scaffold sequence and a sequence encoding an AAV2 3′ ITR sequence. In some embodiments, the spacer sequence may be referred to as a human sgRNA (H-sgRNA) and the scaffold sequence may be referred to as a sgRNA-constant.

[0120] In some embodiments, the sequence encoding the AAV2 5′ ITR comprises the sequence of

(SEQ ID NO: 2)

| | |
|---|---|
| 1 | CTGCGCGCTG GCTCGCTCAC TGAGGCCGCC CGGGCAAAGC |
| | CCGGGCGTCG GGCGACCTTT |
| 61 | GGTCGCCCGG CCTCAGTGAG CGAGCGAGCG CGCAGAGAGG |
| | GAGTGGCCAA CTCCATCACT |
| 121 | AGGGGTTCCT. |

[0121] In some embodiments, the sequence encoding the AAV2 5′ ITR lacking a terminal resolution sequence comprises the sequence of

(SEQ ID NO: 1)

| | |
|---|---|
| 1 | CCTGCAGGCA GCTGCGCGCT CGCTCGCTCA CTGAGGCCGC |
| | CCGGGCAAAG CCCGGGCGTC |
| 61 | GGGCGACCTT TGGTCGCCCG GCCTCAGTGA GCGAGCGAGC |
| | GCGCAGAGAG GGAGTGG. |

[0122] In some embodiments, the sequence encoding the AAV2 3′ ITR comprises the sequence of

(SEQ ID NO: 3)

| | |
|---|---|
| 1 | AGGAACCCCT AGTGATGGAG TTGGCCACTC CCTCTCTGCG |
| | CGCTCGCTCG CTCACTGAGG |
| 61 | CCGGGCGACC AAAGGTCGCC CGACGCCCGG GCTTTGCCCG |
| | GGCGGCCTCA GTGAGCGAGC |
| 121 | GAGCGCGCAG. |

[0123] In some embodiments, the sequence encoding the U6 promoter comprises the sequence of

(SEQ ID NO: 15)

| | |
|---|---|
| 1 | CGAGTCCAAC ACCCGTGGGA ATCCCATGGG CACCATGGCC |
| | CCTCGCTCCA AAAATGCTTT |
| 61 | CGCGTCGCGC AGACACTGCT CGGTAGTTTC GGCGATCAGC |
| | GTTTGAGTAA GAGCCCGCGT |
| 121 | CTGAACCCTC CGCGCCGCCC CGGCCCCAGT GGAAAGACGC |
| | GCAGGCAAAA CGCACCACGT |
| 181 | GACGGAGCGT GACCGCGCGC CGAGCGCGCG CCAAGGTCGG |
| | GCAGGAAGAG GGCCTATTTC |
| 241 | CCATGATTCC TTCATATTTG CATATACGAT ACAAGGCTGT |
| | TAGAGAGATA ATTAGAATTA |
| 301 | ATTTGACTGT AAACACAAAG ATATTAGTAC AAAATACGTG |
| | ACGTAGAAAG TAATAATTTC |
| 361 | TTGGGTAGTT TGCAGTTTTA AAATTATGTT TTAAAATGGA |
| | CTATCATATG CTTACCGTAA |
| 421 | CTTGAAAGTA TTTCGATTTC TTGGCTTTAT ATATCTTGTG |
| | GAAAGGACGA AA. |

[0124] In some embodiments, the sequence encoding the H1 promoter comprises the sequence of

(SEQ ID NO: 16)

| | |
|---|---|
| 1 | CTTCGGCGCG CCCATATTTG CATGTCGCTA TGTGTTCTGG |
| | GAAATCACCA TAAACGTGAA |
| 61 | ATGTCTTTGG ATTTGGGAAT CTTATAAGTT CTGTATGAGA |
| | CCACGGTA. |

[0125] In some embodiments, the sequence encoding the 7SK promoter comprises the sequence of

(SEQ ID NO: 17)

| | |
|---|---|
| 1 | TGACGGCGCG CCCTGCAGTA TTTAGCATGC CCCACCCATC |
| | TGCAAGGCAT TCTGGATAGT |
| 61 | GTCAAAACAG CCGGAAATCA AGTCCGTTTA TCTCAAACTT |
| | TAGCATTTTG GGAATAAATG |
| 121 | ATATTTGCTA TGCTGGTTAA ATTAGATTTT AGTTAAATTT |
| | CCTGCTGAAG CTCTAGTACG |
| 161 | ATAAGTAACT TGACCTAAGT GTAAAGTTGA GATTTCCTTC |
| | AGGTTTATAT AGCTTGTGCG |
| 241 | CCGCCTGGGT A. |

### AAV9-H-sqRNA-Exon 51

[0126] The disclosure provides a self-complementary AAV9 (scAAV9) vector comprising, from 5′ to 3′, a sequence encoding an AAV2 5′ ITR sequence lacking a terminal resolution sequence, a sequence encoding a U6 promoter region, a sequence encoding a U6 promoter, a sequence encoding a first spacer sequence, a sequence encoding a first scaffold sequence, a sequence encoding an H1 promoter, a sequence encoding a second spacer sequence, a sequence encoding a second scaffold sequence, a sequence encoding a 7SK promoter, a sequence encoding a third spacer sequence, a sequence encoding a third scaffold sequence and a sequence encoding an AAV2 3′ ITR sequence. In some embodiments, the spacer sequence may be referred to as a human sgRNA (H-sgRNA) and the scaffold sequence may be referred to as a sgRNA-constant.

[0127] In some embodiments, the self-complementary AAV9 (scAAV9) vector comprising, from 5′ to 3′, a sequence encoding an AAV2 5′ ITR sequence lacking a terminal resolution sequence, a sequence encoding a U6 promoter region, a sequence encoding a first single guide RNA (sgRNA), a sequence encoding an H1 promoter, a sequence encoding a second sgRNA, a sequence encoding a 7SK promoter, a sequence encoding a third sgRNA and a sequence encoding an AAV2 3′ ITR sequence.

[0128] In some embodiments, the sequence encoding a first spacer sequence, the sequence encoding a second spacer sequence and the sequence encoding a third spacer sequence comprise the sequence of CACCAGAGTAACAGTCTGAG (SEQ ID NO: 13), or a sequence at least 95% or at least 99% similar thereto. In some embodiments, the sequence encoding a first spacer sequence, the sequence encoding a second spacer sequence and the sequence encoding a third spacer sequence comprise the sequence of CACCAGAGTAACAGTCTGAG (SEQ ID NO: 13). In some embodiments, the sequence encoding a first scaffold sequence, the sequence encoding a second scaffold sequence and the sequence encoding a third scaffold sequence comprise the sequence of GTTTAAGAGCTATGCTGGAAACAGCATAGCAAGTTTAAATAAGGCTAGTCCGTTAT CAACTTGAAAAAGTGGCACCGAGTCGGTGCTTTTTTT (SEQ ID NO: 2348), or a sequence at least 95% or at least 99% similar thereto. In some embodiments, the sequence encoding a first scaffold sequence, the sequence encoding a second scaffold sequence and the sequence encoding a third scaffold sequence comprise the sequence of GTTTAAGAGCTATGCTGGAAACAGCATAGCAAGTTTAAATAAGGCTAGTCCGTTAT CAACTTGAAAAAGTGGCACCGAGTCGGTGCTTTTTTT (SEQ ID NO: 2348). In some embodiments, the sequence encoding a first scaffold sequence, the sequence encoding a second scaffold sequence and the sequence encoding a third scaffold sequence comprise the sequence of GTTTTAGAGCTAGAAATAGCAGTTAAAATAAGGCTAGTCCGTTATCAACTTGAAAAA GTGGCACCGAGTCGGTG (SEQ ID NO: 2357), or a sequence at least 95% or at least 99% similar thereto. In some embodiments, the sequence encoding a first scaffold sequence, the sequence encoding a second scaffold sequence and the sequence encoding a third scaffold sequence comprise the sequence of GTTTTAGAGCTAGAAATAGCAGTTAAAATAAGGCTAGTCCGTTATCAACTTGAAAAA GTGGCACCGAGTCGGTG (SEQ ID NO: 2357). In some embodiments, the sequence encoding a first scaffold sequence, the sequence encoding a second scaffold sequence and the sequence encoding a third scaffold sequence comprise the sequence of GTTGGAACCATTCAAAACAGCATAGCAAGTTAAAATAAGGCTAGTCCGTTATCAACT TGAAAAAGTGGCACCGAGTCGGTGCTTTTTT (SEQ ID NO: 2358), or a sequence at least 95% or at least 99% similar thereto. In some embodiments, the sequence encoding a first scaffold sequence, the sequence encoding a second scaffold sequence and the sequence encoding a third scaffold sequence comprise the sequence of GTTGGAACCATTCAAAACAGCATAGCAAGTTAAAATAAGGCTAGTCCGTTATCAACT TGAAAAAGTGGCACCGAGTCGGTGCTTTTTT (SEQ ID NO: 2358). In some embodiments, the sequence encoding a first scaffold sequence, the sequence encoding a second scaffold sequence and the sequence encoding a third scaffold sequence comprise the sequence of GTTTAAGAGCTATGAAACAGCATAGCAAGTTTAAATAAGGCTAGTCCGTTATCAACT TGAAAAAGTGGCACCGAGTCGGTGCTTTTTTT (SEQ ID NO: 2359), or a sequence at least 95% or at least 99% similar thereto. In some embodiments, the sequence encoding a first scaffold sequence, the sequence encoding a second scaffold sequence and the sequence encoding a third scaffold sequence comprise the sequence of GTTTAAGAGCTATGAAACAGCATAGCAAGTTTAAATAAGGCTAGTCCGTTATCAACT TGAAAAAGTGGCACCGAGTCGGTGCTTTTTTT (SEQ ID NO: 2359). In some embodiments, the sequence encoding a first scaffold sequence, the sequence encoding a second scaffold sequence and the sequence encoding a third scaffold sequence comprise the sequence of GTTTAAGAGCTATGCGAAACAGCATAGCAAGTTTAAATAAGGCTAGTCCGTTATCA ACTTGAAAAAGTGGCACCGAGTCGGTGCTTTTTTT (SEQ ID NO: 2360), or a sequence at least 95% or at least 99% similar thereto. In some embodiments, the sequence encoding a first scaffold sequence, the sequence encoding a second scaffold sequence and the sequence encoding a third scaffold sequence comprise the sequence of GTTTAAGAGCTATGCGAAACAGCATAGCAAGTTTAAATAAGGCTAGTCCGTTATCA ACTTGAAAAAGTGGCACCGAGTCGGTGCTTTTTTT (SEQ ID NO: 2360). In some embodiments, the sequence encoding a first scaffold sequence, the sequence encoding a second scaffold sequence and the sequence encoding a third scaffold sequence comprise the sequence of GTTTAAGAGCTATGCTGTTTGAAACAGCATAGCAAGTTTAAATAAGGCTAGTCCGTT ATCAACTTGAAAAAGTGGCACCGAGTCGGTGCTTTTTTT (SEQ ID NO: 2361), or a sequence at least 95% or at least 99% similar thereto. In some embodiments, the sequence encoding a first scaffold sequence, the sequence encoding a second scaffold sequence and the sequence encoding a third scaffold sequence comprise the sequence of GTTTAAGAGCTATGCTGTTTGAAACAGCATAGCAAGTTTAAATAAGGCTAGTCCGTT ATCAACTTGAAAAAGTGGCACCGAGTCGGTGCTTTTTTT (SEQ ID NO: 2361). In some embodiments, the sequence encoding a first scaffold sequence, the sequence encoding a second scaffold sequence and the sequence encoding a third scaffold sequence comprise the sequence of GTTTAAGAGCTATGCTGTTTTGGAAACAGCATAGCAAGTTTAAATAAGGCTAGTCC GTTATCAACTTGAAAAAGTGGCACCGAGTCGGTGCTTTTTTT (SEQ ID NO: 2362), or a sequence at least 95% or at least 99% similar thereto. In some embodiments, the sequence encoding a first scaffold sequence, the sequence encoding a second scaffold sequence and the sequence encoding a third scaffold sequence comprise the sequence of

(SEQ ID NO: 2362)
GTTTAAGAGCTATGCTGTTTTGGAAACAGCATAGCAAGTTTAAATAAGGCT
AGTCCGTTATCAACTTGAAAAAGTGGCACCGAGTCGGTGCTTTTTTT.

[0129] In some embodiments, the first sgRNA, the second sgRNA and/or the third sgRNA comprises a spacer sequence comprising SEQ ID NO: 13 and a scaffold sequence comprising SEQ ID NO: 2348, the combination of which comprises the sequence of

(SEQ ID NO: 2365)
CACCAGAGTAACAGTCTGAGGTTTAAGAGCTATGCTGGAAACAGCATAGCA
AGTTTAAATAAGGCTAGTCCGTTATCAACTTGAAAAAGTGGCACCGAGTCG
GTGCTTTTTTT.

[0130] In some embodiments, the first sgRNA, the second sgRNA and/or the third sgRNA comprises a spacer sequence comprising SEQ ID NO: 13 and a scaffold sequence comprising SEQ ID NO: 2357, the combination of which comprises the sequence of

(SEQ ID NO: 2366)
CACCAGAGTAACAGTCTGAGGTTTTAGAGCTAGAAATAGCAGTTAAAATAA
GGCTAGTCCGTTATCAACTTGAAAAAGTGGCACCGAGTCGGTG.

[0131] In some embodiments, the first sgRNA, the second sgRNA and/or the third sgRNA comprises a spacer sequence comprising SEQ ID NO: 13 and a scaffold sequence comprising SEQ ID NO: 2358, the combination of which comprises the sequence of

(SEQ ID NO: 2367)
CACCAGAGTAACAGTCTGAGGTTGGAACCATTCAAAACAGCATAGCAAGTT
AAAATAAGGCTAGTCCGTTATCAACTTGAAAAAGTGGCACCGAGTCGGTGC
TTTTTT.

[0132] In some embodiments, the first sgRNA, the second sgRNA and/or the third sgRNA comprises a spacer sequence comprising SEQ ID NO: 13 and a scaffold sequence comprising SEQ ID NO: 2359, the combination of which comprises the sequence of

(SEQ ID NO: 2368)
CACCAGAGTAACAGTCTGAGGTTTAAGAGCTATGAAACAGCATAGCAAGTT
TAAATAAGGCTAGTCCGTTATCAACTTGAAAAAGTGGCACCGAGTCGGTGC
TTTTTTT.

[0133] In some embodiments, the first sgRNA, the second sgRNA and/or the third sgRNA comprises a spacer sequence comprising SEQ ID NO: 13 and a scaffold sequence comprising SEQ ID NO: 2360, the combination of which comprises the sequence of

(SEQ ID NO: 2369)
CACCAGAGTAACAGTCTGAGGTTTAAGAGCTATGCGAAACAGCATAGCAAG
TTTAAATAAGGCTAGTCCGTTATCAACTTGAAAAAGTGGCACCGAGTCGGT
GCTTTTTTT.

[0134] In some embodiments, the first sgRNA, the second sgRNA and/or the third sgRNA comprises a spacer sequence comprising SEQ ID NO: 13 and a scaffold sequence comprising SEQ ID NO: 2361, the combination of which comprises the sequence of

(SEQ ID NO: 2370)
CACCAGAGTAACAGTCTGAGGTTTAAGAGCTATGCTGTTTGAAACAGCATA
GCAAGTTTAAATAAGGCTAGTCCGTTATCAACTTGAAAAAGTGGCACCGAG
TCGGTGCTTTTTTT.

[0135] In some embodiments, the first sgRNA, the second sgRNA and/or the third sgRNA comprises a spacer sequence comprising SEQ ID NO: 13 and a scaffold sequence comprising SEQ ID NO: 2362, the combination of which comprises the sequence of

(SEQ ID NO: 2371)
CACCAGAGTAACAGTCTGAGGTTTAAGAGCTATGCTGTTTTGGAAACAGCA
TAGCAAGTTTAAATAAGGCTAGTCCGTTATCAACTTGAAAAAGTGGCACCG
AGTCGGTGCTTTTTTT.

### AAV9-H-sqRNA-Exon 45

[0136] The disclosure provides a self-complementary AAV9 (scAAV9) vector comprising, from 5′ to 3′, a sequence encoding an AAV2 5′ ITR sequence lacking a terminal resolution sequence, a sequence encoding a U6 promoter region, a sequence encoding a U6 promoter, a sequence encoding a first spacer sequence, a sequence encoding a first scaffold sequence, a sequence encoding an H1 promoter, a sequence encoding a second spacer sequence, a sequence encoding a second scaffold sequence, a sequence encoding a 7SK promoter, a sequence encoding a third spacer sequence, a sequence encoding a third scaffold sequence and a sequence encoding an AAV2 3′ ITR sequence. In some embodiments, the spacer sequence may be referred to as a human sgRNA (H-sgRNA) and the scaffold sequence may be referred to as a sgRNA-constant.

[0137] In some embodiments, the self-complementary AAV9 (scAAV9) vector comprising, from 5′ to 3′, a sequence encoding an AAV2 5′ ITR sequence lacking a terminal resolution sequence, a sequence encoding a U6 promoter region, a sequence encoding a first single guide RNA (sgRNA), a sequence encoding an H1 promoter, a sequence encoding a second sgRNA, a sequence encoding a 7SK promoter, a sequence encoding a third sgRNA and a sequence encoding an AAV2 3′ ITR sequence.

[0138] In some embodiments, the sequence encoding a first spacer sequence, the sequence encoding a second spacer sequence and the sequence encoding a third spacer sequence comprise the sequence of ATCTTACAGGAACTCCAGGA (SEQ ID NO: 929), or a sequence at least 95% or at least 99% similar thereto. In some embodiments, the sequence encoding a first spacer sequence, the sequence encoding a second spacer sequence and the sequence encoding a third spacer sequence comprise the sequence of ATCTTACAGGAACTCCAGGA (SEQ ID NO: 929). In some embodiments, the inclusion of the 5′ nucleotides “AT” of the sequence of ATCTTACAGGAACTCCAGGA (SEQ ID NO: 929) reduces predicted off-target editing compared to a sequence that does not comprise one or both of these 5′ nucleotides. the sequence encoding a first spacer sequence, the sequence encoding a second spacer sequence and the sequence encoding a third spacer sequence comprise the sequence of ATCTTACAGGAACTCCAGGA (SEQ ID NO: 929), or a sequence at least 95% or at least 99% similar thereto, which maintains one or both of the 5′ nucleotides “AT”.

[0139] In some embodiments, the sequence encoding a first spacer sequence, the sequence encoding a second spacer sequence and the sequence encoding a third spacer sequence comprise the sequence of ATCTTACAGGAACTCCAGGA (SEQ ID NO: 929), or a sequence at least 95% or at least 99% similar thereto. In some embodiments, the sequence encoding a first spacer sequence, the sequence encoding a second spacer sequence and the sequence encoding a third spacer sequence comprise the sequence of ATCTTACAGGAACTCCAGGA (SEQ ID NO: 929). In some embodiments, the sequence encoding a first scaffold sequence, the sequence encoding a second scaffold sequence and the sequence encoding a third scaffold sequence comprise the sequence of GTTTAAGAGCTATGCTGGAAACAGCATAGCAAGTTTAAATAAGGCTAGTCCGTTAT CAACTTGAAAAAGTGGCACCGAGTCGGTGCTTTTTTT (SEQ ID NO: 2348), or a sequence at least 95% or at least 99% similar thereto. In some embodiments, the sequence encoding a first scaffold sequence, the sequence encoding a second scaffold sequence and the sequence encoding a third scaffold sequence comprise the sequence of GTTTAAGAGCTATGCTGGAAACAGCATAGCAAGTTTAAATAAGGCTAGTCCGTTAT CAACTTGAAAAAGTGGCACCGAGTCGGTGCTTTTTTT (SEQ ID NO: 2348). In some embodiments, the sequence encoding a first scaffold sequence, the sequence encoding a second scaffold sequence and the sequence encoding a third scaffold sequence comprise the sequence of GTTTTAGAGCTAGAAATAGCAGTTAAAATAAGGCTAGTCCGTTATCAACTTGAAAAA GTGGCACCGAGTCGGTG (SEQ ID NO: 2357), or a sequence at least 95% or at least 99% similar thereto. In some embodiments, the sequence encoding a first scaffold sequence, the sequence encoding a second scaffold sequence and the sequence encoding a third scaffold sequence comprise the sequence of GTTTTAGAGCTAGAAATAGCAGTTAAAATAAGGCTAGTCCGTTATCAACTTGAAAAA GTGGCACCGAGTCGGTG (SEQ ID NO: 2357). In some embodiments, the sequence encoding a first scaffold sequence, the sequence encoding a second scaffold sequence and the sequence encoding a third scaffold sequence comprise the sequence of GTTGGAACCATTCAAAACAGCATAGCAAGTTAAAATAAGGCTAGTCCGTTATCAACT TGAAAAAGTGGCACCGAGTCGGTGCTTTTTT (SEQ ID NO: 2358), or a sequence at least 95% or at least 99% similar thereto. In some embodiments, the sequence encoding a first scaffold sequence, the sequence encoding a second scaffold sequence and the sequence encoding a third scaffold sequence comprise the sequence of GTTGGAACCATTCAAAACAGCATAGCAAGTTAAAATAAGGCTAGTCCGTTATCAACT TGAAAAAGTGGCACCGAGTCGGTGCTTTTTT (SEQ ID NO: 2358). In some embodiments, the sequence encoding a first scaffold sequence, the sequence encoding a second scaffold sequence and the sequence encoding a third scaffold sequence comprise the sequence of GTTTAAGAGCTATGAAACAGCATAGCAAGTTTAAATAAGGCTAGTCCGTTATCAACT TGAAAAAGTGGCACCGAGTCGGTGCTTTTTTT (SEQ ID NO: 2359), or a sequence at least 95% or at least 99% similar thereto. In some embodiments, the sequence encoding a first scaffold sequence, the sequence encoding a second scaffold sequence and the sequence encoding a third scaffold sequence comprise the sequence of GTTTAAGAGCTATGAAACAGCATAGCAAGTTTAAATAAGGCTAGTCCGTTATCAACT TGAAAAAGTGGCACCGAGTCGGTGCTTTTTTT (SEQ ID NO: 2359). In some embodiments, the sequence encoding a first scaffold sequence, the sequence encoding a second scaffold sequence and the sequence encoding a third scaffold sequence comprise the sequence of GTTTAAGAGCTATGCGAAACAGCATAGCAAGTTTAAATAAGGCTAGTCCGTTATCA ACTTGAAAAAGTGGCACCGAGTCGGTGCTTTTTTT (SEQ ID NO: 2360), or a sequence at least 95% or at least 99% similar thereto. In some embodiments, the sequence encoding a first scaffold sequence, the sequence encoding a second scaffold sequence and the sequence encoding a third scaffold sequence comprise the sequence of GTTTAAGAGCTATGCGAAACAGCATAGCAAGTTTAAATAAGGCTAGTCCGTTATCA ACTTGAAAAAGTGGCACCGAGTCGGTGCTTTTTTT (SEQ ID NO: 2360). In some embodiments, the sequence encoding a first scaffold sequence, the sequence encoding a second scaffold sequence and the sequence encoding a third scaffold sequence comprise the sequence of GTTTAAGAGCTATGCTGTTTGAAACAGCATAGCAAGTTTAAATAAGGCTAGTCCGTT ATCAACTTGAAAAAGTGGCACCGAGTCGGTGCTTTTTTT (SEQ ID NO: 2361), or a sequence at least 95% or at least 99% similar thereto. In some embodiments, the sequence encoding a first scaffold sequence, the sequence encoding a second scaffold sequence and the sequence encoding a third scaffold sequence comprise the sequence of GTTTAAGAGCTATGCTGTTTGAAACAGCATAGCAAGTTTAAATAAGGCTAGTCCGTT ATCAACTTGAAAAAGTGGCACCGAGTCGGTGCTTTTTTT (SEQ ID NO: 2361). In some embodiments, the sequence encoding a first scaffold sequence, the sequence encoding a second scaffold sequence and the sequence encoding a third scaffold sequence comprise the sequence of GTTTAAGAGCTATGCTGTTTTGGAAACAGCATAGCAAGTTTAAATAAGGCTAGTCC GTTATCAACTTGAAAAAGTGGCACCGAGTCGGTGCTTTTTTT (SEQ ID NO: 2362), or a sequence at least 95% or at least 99% similar thereto. In some embodiments, the sequence encoding a first scaffold sequence, the sequence encoding a second scaffold sequence and the sequence encoding a third scaffold sequence comprise the sequence of

(SEQ ID NO: 2362)
GTTTAAGAGCTATGCTGTTTTGGAAACAGCATAGCAAGTTTAAATAAGGCT
AGTCCGTTATCAACTTGAAAAAGTGGCACCGAGTCGGTGCTTTTTTT.

[0140] In some embodiments, the first sgRNA, the second sgRNA and/or the third sgRNA comprises a spacer sequence comprising SEQ ID NO: 929 and a scaffold sequence comprising SEQ ID NO: 2348, the combination of which comprises the sequence of

(SEQ ID NO: 2372)
ATCTTACAGGAACTCCAGGAGTTTAAGAGCTATGCTGGAAACAGCATAGCA
AGTTTAAATAAGGCTAGTCCGTTATCAACTTGAAAAAGTGGCACCGAGTCG
GTGCTTTTTTT.

[0141] In some embodiments, the first sgRNA, the second sgRNA and/or the third sgRNA comprises a spacer sequence comprising SEQ ID NO: 929 and a scaffold sequence comprising SEQ ID NO: 2357, the combination of which comprises the sequence of

(SEQ ID NO: 2373)
ATCTTACAGGAACTCCAGGAGTTTTAGAGCTAGAAATAGCAGTTAAAATAA
GGCTAGTCCGTTATCAACTTGAAAAAGTGGCACCGAGTCGGTG.

[0142] In some embodiments, the first sgRNA, the second sgRNA and/or the third sgRNA comprises a spacer sequence comprising SEQ ID NO: 929 and a scaffold sequence comprising SEQ ID NO: 2358, the combination of which comprises the sequence of

(SEQ ID NO: 2374)
ATCTTACAGGAACTCCAGGAGTTGGAACCATTCAAAACAGCATAGCAAGTT
AAAATAAGGCTAGTCCGTTATCAACTTGAAAAAGTGGCACCGAGTCGGTGC
TTTTTT.

[0143] In some embodiments, the first sgRNA, the second sgRNA and/or the third sgRNA comprises a spacer sequence comprising SEQ ID NO: 929 and a scaffold sequence comprising SEQ ID NO: 2359, the combination of which comprises the sequence of

(SEQ ID NO: 2375)
ATCTTACAGGAACTCCAGGAGTTTAAGAGCTATGAAACAGCATAGCAAGTT
TAAATAAGGCTAGTCCGTTATCAACTTGAAAAAGTGGCACCGAGTCGGTGC
TTTTTTT.

[0144] In some embodiments, the first sgRNA, the second sgRNA and/or the third sgRNA comprises a spacer sequence comprising SEQ ID NO: 929 and a scaffold sequence comprising SEQ ID NO: 2360, the combination of which comprises the sequence of

(SEQ ID NO: 2376)
ATCTTACAGGAACTCCAGGAGTTTAAGAGCTATGCGAAACAGCATAGCAAG
TTTAAATAAGGCTAGTCCGTTATCAACTTGAAAAAGTGGCACCGAGTCGGT
GCTTTTTTT.

[0145] In some embodiments, the first sgRNA, the second sgRNA and/or the third sgRNA comprises a spacer sequence comprising SEQ ID NO: 929 and a scaffold sequence comprising SEQ ID NO: 2361, the combination of which comprises the sequence of

(SEQ ID NO: 2377)
ATCTTACAGGAACTCCAGGAGTTTAAGAGCTATGCTGTTTGAAACAGCATA
GCAAGTTTAAATAAGGCTAGTCCGTTATCAACTTGAAAAAGTGGCACCGAG
TCGGTGCTTTTTTT.

[0146] In some embodiments, the first sgRNA, the second sgRNA and/or the third sgRNA comprises a spacer sequence comprising SEQ ID NO: 929 and a scaffold sequence comprising SEQ ID NO: 2362, the combination of which comprises the sequence of

(SEQ ID NO: 2378)
ATCTTACAGGAACTCCAGGAGTTTAAGAGCTATGCTGTTTTGGAAACAGCA
TAGCAAGTTTAAATAAGGCTAGTCCGTTATCAACTTGAAAAAGTGGCACCG
AGTCGGTGCTTTTTTT.

AAV9-H-sqRNA-Exon 45 (18-mer)

[0147] The disclosure provides a self-complementary AAV9 (scAAV9) vector comprising, from 5′ to 3′, a sequence encoding an AAV2 5′ ITR sequence lacking a terminal resolution sequence, a sequence encoding a U6 promoter region, a sequence encoding a U6 promoter, a sequence encoding a first spacer sequence, a sequence encoding a first scaffold sequence, a sequence encoding an H1 promoter, a sequence encoding a second spacer sequence, a sequence encoding a second scaffold sequence, a sequence encoding a 7SK promoter, a sequence encoding a third spacer sequence, a sequence encoding a third scaffold sequence and a sequence encoding an AAV2 3′ ITR sequence. In some embodiments, the spacer sequence may be referred to as a human sgRNA (H-sgRNA) and the scaffold sequence may be referred to as a sgRNA-constant.

[0148] In some embodiments, the self-complementary AAV9 (scAAV9) vector comprising, from 5′ to 3′, a sequence encoding an AAV2 5′ ITR sequence lacking a terminal resolution sequence, a sequence encoding a U6 promoter region, a sequence encoding a first single guide RNA (sgRNA), a sequence encoding an H1 promoter, a sequence encoding a second sgRNA, a sequence encoding a 7SK promoter, a sequence encoding a third sgRNA and a sequence encoding an AAV2 3′ ITR sequence.

[0149] In some embodiments, the sequence encoding a first spacer sequence, the sequence encoding a second spacer sequence and the sequence encoding a third spacer sequence comprise the sequence of CTTACAGGAACTCCAGGA (SEQ ID NO: 2356), or a sequence at least 95% or at least 99% similar thereto. In some embodiments, the sequence encoding a first spacer sequence, the sequence encoding a second spacer sequence and the sequence encoding a third spacer sequence comprise the sequence of CTTACAGGAACTCCAGGA (SEQ ID NO: 2356).

[0150] In some embodiments, the sequence encoding a first spacer sequence, the sequence encoding a second spacer sequence and the sequence encoding a third spacer sequence comprise the sequence of CTTACAGGAACTCCAGGA (SEQ ID NO: 2356), or a sequence at least 95% or at least 99% similar thereto. In some embodiments, the sequence encoding a first spacer sequence, the sequence encoding a second spacer sequence and the sequence encoding a third spacer sequence comprise the sequence of CTTACAGGAACTCCAGGA (SEQ ID NO: 2356). In some embodiments, the sequence encoding a first scaffold sequence, the sequence encoding a second scaffold sequence and the sequence encoding a third scaffold sequence comprise the sequence of GTTTAAGAGCTATGCTGGAAACAGCATAGCAAGTTTAAATAAGGCTAGTCCGTTAT CAACTTGAAAAAGTGGCACCGAGTCGGTGCTTTTTTT (SEQ ID NO: 2348), or a sequence at least 95% or at least 99% similar thereto. In some embodiments, the sequence encoding a first scaffold sequence, the sequence encoding a second scaffold sequence and the sequence encoding a third scaffold sequence comprise the sequence of GTTTAAGAGCTATGCTGGAAACAGCATAGCAAGTTTAAATAAGGCTAGTCCGTTAT CAACTTGAAAAAGTGGCACCGAGTCGGTGCTTTTTTT (SEQ ID NO: 2348). In some embodiments, the sequence encoding a first scaffold sequence, the sequence encoding a second scaffold sequence and the sequence encoding a third scaffold sequence comprise the sequence of GTTTTAGAGCTAGAAATAGCAGTTAAAATAAGGCTAGTCCGTTATCAACTTGAAAAA GTGGCACCGAGTCGGTG (SEQ ID NO: 2357), or a sequence at least 95% or at least 99% similar thereto. In some embodiments, the sequence encoding a first scaffold sequence, the sequence encoding a second scaffold sequence and the sequence encoding a third scaffold sequence comprise the sequence of GTTTTAGAGCTAGAAATAGCAGTTAAAATAAGGCTAGTCCGTTATCAACTTGAAAAA GTGGCACCGAGTCGGTG (SEQ ID NO: 2357). In some embodiments, the sequence encoding a first scaffold sequence, the sequence encoding a second scaffold sequence and the sequence encoding a third scaffold sequence comprise the sequence of GTTGGAACCATTCAAAACAGCATAGCAAGTTAAAATAAGGCTAGTCCGTTATCAACT TGAAAAAGTGGCACCGAGTCGGTGCTTTTTT (SEQ ID NO: 2358), or a sequence at least 95% or at least 99% similar thereto. In some embodiments, the sequence encoding a first scaffold sequence, the sequence encoding a second scaffold sequence and the sequence encoding a third scaffold sequence comprise the sequence of GTTGGAACCATTCAAAACAGCATAGCAAGTTAAAATAAGGCTAGTCCGTTATCAACT TGAAAAAGTGGCACCGAGTCGGTGCTTTTTT (SEQ ID NO: 2358). In some embodiments, the sequence encoding a first scaffold sequence, the sequence encoding a second scaffold sequence and the sequence encoding a third scaffold sequence comprise the sequence of GTTTAAGAGCTATGAAACAGCATAGCAAGTTTAAATAAGGCTAGTCCGTTATCAACT TGAAAAAGTGGCACCGAGTCGGTGCTTTTTTT (SEQ ID NO: 2359), or a sequence at least 95% or at least 99% similar thereto. In some embodiments, the sequence encoding a first scaffold sequence, the sequence encoding a second scaffold sequence and the sequence encoding a third scaffold sequence comprise the sequence of GTTTAAGAGCTATGAAACAGCATAGCAAGTTTAAATAAGGCTAGTCCGTTATCAACT TGAAAAAGTGGCACCGAGTCGGTGCTTTTTTT (SEQ ID NO: 2359). In some embodiments, the sequence encoding a first scaffold sequence, the sequence encoding a second scaffold sequence and the sequence encoding a third scaffold sequence comprise the sequence of GTTTAAGAGCTATGCGAAACAGCATAGCAAGTTTAAATAAGGCTAGTCCGTTATCA ACTTGAAAAAGTGGCACCGAGTCGGTGCTTTTTTT (SEQ ID NO: 2360), or a sequence at least 95% or at least 99% similar thereto. In some embodiments, the sequence encoding a first scaffold sequence, the sequence encoding a second scaffold sequence and the sequence encoding a third scaffold sequence comprise the sequence of GTTTAAGAGCTATGCGAAACAGCATAGCAAGTTTAAATAAG GCTAGTCCGTTATCA ACTTGAAAAAGTGGCACCGAGTCGGTGCTTTTTTT (SEQ ID NO: 2360). In some embodiments, the sequence encoding a first scaffold sequence, the sequence encoding a second scaffold sequence and the sequence encoding a third scaffold sequence comprise the sequence of GTTTAAGAGCTATGCTGTTTGAAACAGCATAGCAAGTTTAAATAAGGCTAGTCCGTT ATCAACTTGAAAAAGTGGCACCGAGTCGGTGCTTTTTTT (SEQ ID NO: 2361), or a sequence at least 95% or at least 99% similar thereto. In some embodiments, the sequence encoding a first scaffold sequence, the sequence encoding a second scaffold sequence and the sequence encoding a third scaffold sequence comprise the sequence of GTTTAAGAGCTATGCTGTTTGAAACAGCATAGCAAGTTTAAATAAGGCTAGTCCGTT ATCAACTTGAAAAAGTGGCACCGAGTCGGTGCTTTTTTT (SEQ ID NO: 2361). In some embodiments, the sequence encoding a first scaffold sequence, the sequence encoding a second scaffold sequence and the sequence encoding a third scaffold sequence comprise the sequence of GTTTAAGAGCTATGCTGTTTTGGAAACAGCATAGCAAGTTTAAATAAGGCTAGTCC GTTATCAACTTGAAAAAGTGGCACCGAGTCGGTGCTTTTTTT (SEQ ID NO: 2362), or a sequence at least 95% or at least 99% similar thereto. In some embodiments, the sequence encoding a first scaffold sequence, the sequence encoding a second scaffold sequence and the sequence encoding a third scaffold sequence comprise the sequence of

(SEQ ID NO: 2362)
GTTTAAGAGCTATGCTGTTTTGGAAACAGCATAGCAAGTTTAAATAAGGCT
AGTCCGTTATCAACTTGAAAAAGTGGCACCGAGTCGGTGCTTTTTTT.

[0151] In some embodiments, the first sgRNA, the second sgRNA and/or the third sgRNA comprises a spacer sequence comprising SEQ ID NO: 2356 and a scaffold sequence comprising SEQ ID NO: 2348, the combination of which comprises the sequence of

(SEQ ID NO: 2349)
CTTACAGGAACTCCAGGAGTTTAAGAGCTATGCTGGAAACAGCATAGCAAG
TTTAAATAAGGCTAGTCCGTTATCAACTTGAAAAAGTGGCACCGAGTCGGT
GCTTTTTTT.

[0152] In some embodiments, the first sgRNA, the second sgRNA and/or the third sgRNA comprises a spacer sequence comprising SEQ ID NO: 2356 and a scaffold sequence comprising SEQ ID NO: 2357, the combination of which comprises the sequence of

(SEQ ID NO: 2350)
CTTACAGGAACTCCAGGAGTTTTAGAGCTAGAAATAGCAGTTAAAATAAGG
CTAGTCCGTTATCAACTTGAAAAAGTGGCACCGAGTCGGTG.

[0153] In some embodiments, the first sgRNA, the second sgRNA and/or the third sgRNA comprises a spacer sequence comprising SEQ ID NO: 2356 and a scaffold sequence comprising SEQ ID NO: 2358, the combination of which comprises the sequence of

(SEQ ID NO: 2351)
CTTACAGGAACTCCAGGAGTTGGAACCATTCAAAACAGCATAGCAAGTTAA
AATAAGGCTAGTCCGTTATCAACTTGAAAAAGTGGCACCGAGTCGGTGCTT
TTTT.

[0154] In some embodiments, the first sgRNA, the second sgRNA and/or the third sgRNA comprises a spacer sequence comprising SEQ ID NO: 2356 and a scaffold sequence comprising SEQ ID NO: 2359, the combination of which comprises the sequence of

(SEQ ID NO: 2352)
CTTACAGGAACTCCAGGAGTTTAAGAGCTATGAAACAGCATAGCAAGTTTA
AATAAGGCTAGTCCGTTATCAACTTGAAAAAGTGGCACCGAGTCGGTGCTT
TTTTT.

[0155] In some embodiments, the first sgRNA, the second sgRNA and/or the third sgRNA comprises a spacer sequence comprising SEQ ID NO: 2356 and a scaffold sequence comprising SEQ ID NO: 2360, the combination of which comprises the sequence of

(SEQ ID NO: 2353)
CTTACAGGAACTCCAGGAGTTTAAGAGCTATGCGAAACAGCATAGCAAGTT
TAAATAAGGCTAGTCCGTTATCAACTTGAAAAAGTGGCACCGAGTCGGTGC
TTTTTTT.

[0156] In some embodiments, the first sgRNA, the second sgRNA and/or the third sgRNA comprises a spacer sequence comprising SEQ ID NO: 2356 and a scaffold sequence comprising SEQ ID NO: 2361, the combination of which comprises the sequence of

(SEQ ID NO: 2354)
ATCTTACAGGAACTCCAGGAGTTTAAGAGCTATGCTGTTTGAAACAGCATA
GCAAGTTTAAATAAGGCTAGTCCGTTATCAACTTGAAAAAGTGGCACCGAG
TCGGTGCTTTTTTT.

[0157] In some embodiments, the first sgRNA, the second sgRNA and/or the third sgRNA comprises a spacer sequence comprising SEQ ID NO: 2356 and a scaffold sequence comprising SEQ ID NO: 2362, the combination of which comprises the sequence of

(SEQ ID NO: 2355)
ATCTTACAGGAACTCCAGGAGTTTAAGAGCTATGCTGTTTTGGAAACAGCA
TAGCAAGTTTAAATAAGGCTAGTCCGTTATCAACTTGAAAAAGTGGCACCG
AGTCGGTGCTTTTTTT.

### Pharmaceutical Composition

[0158] Also provided herein is a pharmaceutical composition comprising an AAV vector of the disclosure. In some embodiments, the composition may further comprise a pharmaceutically-acceptable carrier and/or other medicinal agents, pharmaceutical agents, carriers, adjuvants, diluents, etc. In general, a “pharmaceutically acceptable carrier” is one that is non-toxic or unduly detrimental to cells. Exemplary physiologically acceptable carriers include sterile, pyrogen-free water and sterile, pyrogen-free phosphate buffered saline.

### Methods of Treatment

[0159] The AAV vectors disclosed herein may be used to treat or prevent a disease or disorder, such as a genetic disease or disorder, in a subject in need thereof. In some embodiments, the genetic disease or disorder is a muscle disease or disorder. The muscle disease or disorder may be selected from, for example, Duchenne Muscular Dystrophy (DMD), Becker muscular dystrophy (BMD), Emery-Dreifuss dystrophy, myotonic dystrophy, limb-girdle muscular dystrophy, oculopharyngeal muscular dystrophy, congenital dystrophy, familial periodic paralysis. In some embodiments, the muscle disease or disorder may be mitochondrial oxidative phosphorylation disorder, or a glycogen storage disease (e.g., von Gierke's disease, Pompe's disease, Forbes-Cori disease, Andersen's disease, McArdle's disease, Hers' disease, Tarui's disease, or Fanconi-Bickel syndrome.) In some embodiments, the AAV vectors disclosed herein are used to treat or prevent DMD.

[0160] The subject may be a mammal, such as a primate, ungulate (e.g., cow, pig, horse), cat, dog, domestic pet or domesticated mammal. In some cases, the mammal may be a rabbit, pig, horse, sheep, cow, cat or dog, or a human. In some embodiments, the subject is a human. In some embodiments, the subject is an adult human. In some embodiments, the subject is a juvenile human. In some embodiments, the subject is greater than about 18 years old, greater than about 25 years old, or greater than about 35 years old. In some embodiments, the subject is less than about 18 years old, less than about 16 years old, less than about 14 years old, less than about 12 years old, less than about 10 years old, less than about 8 years old, less than about 6 years old, less than about 5 years old, less than about 4 years old, less than about 3 years old, less than about 2 years old, less than about 1 year old, or less than about 6 months old.

[0161] Exemplary doses for achieving therapeutic effects are virus titers of at least about 10⁵, at least about 10⁶, at least about 10⁷, at least about 10⁸, at least about 10⁹, at least about 10¹⁰, at least about 10¹¹, at least about 10¹², at least about 10¹³, at least about 10¹⁴, at least about 10¹⁵ transducing units or more, for example about 10⁸-10¹³ transducing units.

[0162] Exemplary modes of administration of the AAV vectors include oral, rectal, transmucosal, topical, transdermal, inhalation, parenteral (e.g., intravenous, subcutaneous, intradermal, intramuscular, and intra-articular, as well as direct tissue or organ injection, alternatively, intrathecal, direct intramuscular, intraventricular, intravenous, intraperitoneal, intranasal, or intraocular injections. Injectables can be prepared in conventional forms, either as liquid solutions or suspensions, solid forms suitable for solution or suspension in liquid prior to injection, or as emulsions. Alternatively the virus may be administered locally, for example in a depot or sustained-release formulation.

[0163] The AAV vectors of the disclosure may optionally be administered simultaneously or sequentially with a second vector comprising an expression cassette for a nuclease. The second vector may be a viral vector (e.g., an AAV) or a non-viral vector (e.g., a plasmid or nanoparticle). The nuclease may be, for example, a Cas9 or a Cpf1 nuclease.

[0164] In some embodiments, the nuclease is codon optimized for expression in mammalian cells. In some embodiments, the nuclease is codon optimized for expression in human cells or mouse cells.

[0165] In some embodiments, a first AAV vector comprising an AAV expression cassette of the disclosure is administered simultaneously or sequentially with a second AAV vector comprising an expression cassette for a nuclease (e.g., a Cas9 nuclease).

[0166] In some embodiments a first AAV vector and a second AAV vector are administered to a subject, wherein the first vector comprises an expression cassette comprising sequences encoding a first inverted terminal repeat (ITR); a first promoter; a first gRNA comprising a first gRNA targeting region; a second promoter; a second gRNA comprising a second gRNA targeting region; a third promoter; a third gRNA comprising a third gRNA targeting region; and a second ITR, and wherein the second vector comprises an expression cassette for a Cas9 nuclease. Optionally, one or both of the first vector and the second-vector are self-complimentary. In some embodiments, one or both of the first vector and the second vector further comprise a stuffer sequence.

[0167] In some embodiments a first AAV vector and a second AAV vector are administered to a subject, wherein the first vector comprises an expression cassette comprising sequences encoding a first inverted terminal repeat (ITR); a first promoter; a first gRNA comprising a first gRNA targeting region (SEQ ID NO: 13) and a scaffold region; a second promoter; a second gRNA comprising a second gRNA targeting region (SEQ ID NO: 13) and a scaffold region; a third promoter; a third gRNA comprising a third gRNA targeting region (SEQ ID NO: 13) and a scaffold region; and a second ITR, and wherein the second vector comprises an expression cassette for a Cas9 nuclease. Optionally, one or both of the first vector and the second-vector are self-complimentary. In some embodiments, one or both of the first vector and the second vector further comprise a stuffer sequence.

[0168] In some embodiments a first AAV vector and a second AAV vector are administered to a subject, wherein the first vector comprises an expression cassette comprising sequences encoding a first inverted terminal repeat (ITR); the U6 promoter; a first gRNA comprising a first gRNA targeting region (SEQ ID NO: 13) and a scaffold region; the H1 promoter; a second gRNA comprising a second gRNA targeting region (SEQ ID NO: 13) and a scaffold region; the 7SK promoter; a third gRNA comprising a third gRNA targeting region (SEQ ID NO: 13) and a scaffold region; and a second ITR, and wherein the second vector comprises an expression cassette for a Cas9 nuclease. Optionally, one or both of the first vector and the second-vector are self-complimentary. In some embodiments, one or both of the first vector and the second vector further comprise a stuffer sequence.

[0169] In some embodiments a first AAV vector and a second AAV vector are administered to a subject, wherein the first vector comprises an expression cassette comprising sequences encoding a first inverted terminal repeat (ITR) (SEQ ID NO: 1); the U6 promoter (SEQ ID NO: 15); a first gRNA comprising a first gRNA targeting region (SEQ ID NO: 13) and a scaffold region; the H1 promoter (SEQ ID NO: 16); a second gRNA comprising a second gRNA targeting region (SEQ ID NO: 13) and a scaffold region; the 7SK promoter (SEQ ID NO: 17); a third gRNA comprising a third gRNA targeting region (SEQ ID NO: 13) and a scaffold region; and a second ITR (SEQ ID NO: 2), and wherein the second vector comprises an expression cassette for a Cas9 nuclease. Optionally, one or both of the first vector and the second-vector are self-complimentary. In some embodiments, one or both of the first vector and the second vector further comprise a stuffer sequence.

[0170] In some embodiments a first AAV vector and a second AAV vector are administered to a subject, wherein the first vector comprises an expression cassette comprising sequence at least 95% identical to or 100% identical to the sequence of SEQ ID NO: 25 or 26, and wherein the second vector comprises an expression cassette for a Cas9 nuclease. Optionally, one or both of the first vector and the second-vector are self-complimentary. In some embodiments, one or both of the first vector and the second vector further comprise a stuffer sequence.

### EXAMPLES

[0171] The following examples, which are included herein for illustration purposes only, are not intended to be limiting.

### Example 1

[0172] An AAV expression cassette having the sequence of SEQ ID NO: 25 is prepared using standard cloning techniques.

[0173] The AAV expression cassette comprises from 5′ to 3′, a first ITR, the U6 promoter, a first gRNA, the H1 promoter, a second gRNA, the 7SK promoter, a third gRNA, and a second ITR. The first, second, and third gRNA sequences are the same (SEQ ID NO: 13), and target the human dystrophin gene. The AAV expression cassette is self-complimentary.

### Example 2

[0174] An AAV expression cassette having the sequence of SEQ ID NO: 26 is prepared using standard cloning techniques.

[0175] The AAV expression cassette comprises from 5′ to 3′, a first ITR, the U6 promoter, a first gRNA, the H1 promoter, a second gRNA, the 7SK promoter, a third gRNA, a stuffer sequence, and a second ITR. The first, second, and third gRNA sequences are the same (SEQ ID NO: 13), and target the human dystrophin gene. The AAV expression cassette is single-stranded (i.e., not self-complimentary).

### Example 3

[0176] An AAV vector is prepared by transfecting an AAV production cell (e.g., HEK293) with a first plasmid comprising an AAV expression cassette of the disclosure (e.g., SEQ ID NO: 25 or 26), a second plasmid comprising the AAV rev and cap genes, and a third plasmid comprising adenoviral E4, E2a and VA genes. After incubation of the cells for a predetermined period of time, the cells are lysed. AAV vectors comprising the expression cassette are purified and quantified. A pharmaceutical composition is prepared by combining the purified AAV vector with a pharmaceutically acceptable carrier. The pharmaceutical composition is frozen until use.

### Example 4

[0177] An AAV vector is prepared by infecting an AAV production cell (e.g., Sf9) with a first baculovirus comprising an AAV expression cassette of the disclosure (e.g., SEQ ID NO: 25 or 26), and a second baculovirus comprising the AAV rev and cap genes. After incubation of the cells fora predetermined period of time, the cells are lysed. AAV vectors comprising the expression cassette are purified and quantified. A pharmaceutical composition is prepared by combining the purified AAV vector with a pharmaceutically acceptable carrier. The pharmaceutical composition is frozen until use.

### Example 5

[0178] A human subject suffering from DMD is treated by administering to the subject either the AAV vector of Example 3 or the AAV vector of Example 4, in combination with an AAV vector comprising an expression vector for a Cas9 nuclease. The vectors are administered either serially or sequentially, and are administered locally (e.g., intramuscularly) or systemically (e.g., intravenously). The dose of each vector administered to the subject ranges from about 10⁸ to about 10¹³ transducing units.

### Example 6

[0179] A dose ratio study was performed to determine optimal doses and ratios of AAV-Cas9 and self-complementary AAV-sgRNA for use in vivo. The study design is outlined in Table 19. Briefly, 4-week old mice (P4) were injected intraperitoneally (IP) with AAV9-Cas9 and AAV9-sgRNA. Various ratios (vector genomes per kilogram) were tested. At 4-weeks post-dose, various tissues were collected for analysis of tissue dystrophin protein, on-target editing efficiency, and Cas9 protein expression.

TABLE 19
Dose ratio study design

| Age at | AAV9- | AAV9- | | Total | | |
|---|---|---|---|---|---|---|
| dosing/ | Cas9 | sgRNA | | Dose | N | |
| ROA | (vg/kg) | (vg/kg) | Ratio | (vg/kg) | per group | Study Endpoints |
| P4/IP | 5 × 10¹³ | 2 × 10¹³ | 1:0.4 | 7 × 10¹³ | 12 | Tissue collection 4-weeks |
| | | 5 × 10¹³ | 1:1 | 1 × 10¹⁴ | 16 | post-dose for analysis of |
| | | 1 × 10¹⁴ | 1:2 | 1.5 × 10¹⁴ | 16 | tissue dystrophin protein, |
| | | 2 × 10¹⁴ | 1:4 | 2.5 × 10¹⁴ | 16 | on-target editing efficiency, |
| | 1 × 10¹⁴ | 5 × 10¹³ | 1:0.5 | 1.5 × 10¹⁴ | 12 | Cas9 protein, vector |
| | | 1 × 10¹⁴ | 1:1 | 2 × 10¹⁴ | 11 | genomes and transgene |
| | | 2 × 10¹⁴ | 1:2 | 3 × 10¹⁴ | 10 | expression |

ROA = Route of Administration; IP = Intraperitoneal

[0180] Tissue dystrophin quantification was performed on tissue samples from the quadriceps (FIG. 3A), triceps (FIG. 3B), tibialis anterior (FIG. 3C), gastrocnemius (FIG. 3D), diaphragm (FIG. 3E), and heart (FIG. 3F). Samples from these tissues were visualized using a capillary electrophoresis Western blot. Quantification was performed by comparing samples with a standard curve, and dystrophin restoration was expressed as percent of wildtype. Results are shown in FIGS. 3A-3F. In general, greater dystrophin restoration was observed with increased AAV9-sgRNA dose in the majority of skeletal muscles in and in the diaphragm.

[0181] Editing efficiency was evaluated using TIDE (Tracking Indels by Decomposition) analysis in the heart and quadriceps (FIG. 4A-4B). A dose-response was observed in the quadriceps (FIG. 4B), but none was observed in the heart (FIG. 4A).

[0182] Cas9 levels were also measured in various tissues, including quadriceps (FIG. 5A), triceps (FIG. 5B), tibialis anterior (FIG. 5C), gastrocnemius (FIG. 5D), diaphragm (FIG. 5E) and heart (FIG. 5F). Samples from these tissues were visualized using a capillary electrophoresis Western blot. Quantification was performed by comparing samples with a standard curve. In each of these tissues, higher vector doses led to higher Cas9 expression levels.

[0183] The foregoing is illustrative of the present invention, and is not to be construed as limiting thereof. The invention is defined by the following claims, with equivalents of the claims to be included therein.

The application's sequence listing, which the Patent Office published only in electronic form, follows.

SEQUENCE LISTING (3638 sequences)

SEQ ID NO: 1 - DNA, 117 bp, Artificial Sequence
  5' Exemplary ITR Sequence
cctgcaggcagctgcgcgctcgctcgctcactgaggccgcccgggcaaagcccgggcgtcgggcgacctttggtcgcccggcctcagtgagcgagcgagcgcgcagagagggagtgg

SEQ ID NO: 2 - DNA, 130 bp, Artificial Sequence
  5' Exemplary ITR Sequence
ctgcgcgctcgctcgctcactgaggccgcccgggcaaagcccgggcgtcgggcgacctttggtcgcccggcctcagtgagcgagcgagcgcgcagagagggagtggccaactccatcactaggggttcct

SEQ ID NO: 3 - DNA, 130 bp, Artificial Sequence
  3' Exemplary ITR Sequence
aggaacccctagtgatggagttggccactccctctctgcgcgctcgctcgctcactgaggccgggcgaccaaaggtcgcccgacgcccgggctttgcccgggcggcctcagtgagcgagcgagcgcgcag

SEQ ID NO: 4 - DNA, 3 bp, Streptococcus pyogenes
  misc_feature (1)..(1): n is a, c, g, or t
ngg

SEQ ID NO: 5 - DNA, 5 bp, Staphylococcus aureus
  misc_feature (1)..(1): n is a, c, g, or t
ngrrt

SEQ ID NO: 6 - DNA, 5 bp, Staphylococcus aureus
  misc_feature (1)..(1): n is a, c, g, or t
  misc_feature (5)..(5): n is a, c, g, or t
ngrrn

SEQ ID NO: 7 - DNA, 8 bp, Neisseria meningitidis
  misc_feature (1)..(4): n is a, c, g, or t
nnnngatt

SEQ ID NO: 8 - DNA, 8 bp, Campylobacter jejuni
  misc_feature (1)..(4): n is a, c, g, or t
nnnnryac

SEQ ID NO: 9 - DNA, 7 bp, Streptococcus thermophilus
  misc_feature (1)..(2): n is a, c, g, or t
nnagaaw

SEQ ID NO: 10 - DNA, 4 bp, Lachnospiraceae bacterium
tttv

SEQ ID NO: 11 - DNA, 4 bp, Unknown
  Acidaminococcussp.
tttv

SEQ ID NO: 12 - protein, 3685 aa, Homo sapiens
MLWWEEVEDCYEREDVQKKTFTKWVNAQFSKFGKQHIENLFSDLQDGRRLLDLLEGLTGQKLPKEKGSTRVHALNNVNKALRVLQNNNVDLVNIGSTDIVDGNHKLTLGLIWNIILHWQVKNVMKNIMAGLQQTNSEKILLSWVRQSTRNYPQVNVINFTTSWSDGLALNALIHSHRPDLFDWNSVVCQQSATQRLEHAFNIARYQLGIEKLLDPEDVDTTYPDKKSILMYITSLFQVLPQQVSIEAIQEVEMLPRPPKVTKEEHFQLHHQMHYSQQITVSLAQGYERTSSPKPRFKSYAYTQAAYVTTSDPTRSPFPSQHLEAPEDKSFGSSLMESEVNLDRYQTALEEVLSWLLSAEDTLQAQGEISNDVEVVKDQFHTHEGYMMDLTAHQGRVGNILQLGSKLIGTGKLSEDEETEVQEQMNLLNSRWECLRVASMEKQSNLHRVLMDLQNQKLKELNDWLTKTEERTRKMEEEPLGPDLEDLKRQVQQHKVLQEDLEQEQVRVNSLTHMVVVVDESSGDHATAALEEQLKVLGDRWANICRWTEDRWVLLQDILLKWQRLTEEQCLFSAWLSEKEDAVNKIHTTGFKDQNEMLSSLQKLAVLKADLEKKKQSMGKLYSLKQDLLSTLKNKSVTQKTEAWLDNFARCWDNLVQKLEKSTAQISQAVTTTQPSLTQTTVMETVTTVTTREQILVKHAQEELPPPPPQKKRQITVDSEIRKRLDVDITELHSWITRSEAVLQSPEFAIFRKEGNFSDLKEKVNAIEREKAEKFRKLQDASRSAQALVEQMVNEGVNADSIKQASEQLNSRWIEFCQLLSERLNWLEYQNNIIAFYNQLQQLEQMTTTAENWLKIQPTTPSEPTAIKSQLKICKDEVNRLSGLQPQIERLKIQSIALKEKGQGPMFLDADFVAFTNHFKQVFSDVQAREKELQTIFDTLPPMRYQETMSAIRTWVQQSETKLSIPQLSVTDYEIMEQRLGELQALQSSLQEQQSGLYYLSTTVKEMSKKAPSEISRKYQSEFEEIEGRWKKLSSQLVEHCQKLEEQMNKLRKIQNHIQTLKKWMAEVDVFLKEEWPALGDSEILKKQLKQCRLLVSDIQTIQPSLNSVNEGGQKIKNEAEPEFASRLETELKELNTQWDHMCQQVYARKEALKGGLEKTVSLQKDLSEMHEWMTQAEEEYLERDFEYKTPDELQKAVEEMKRAKEEAQQKEAKVKLLTESVNSVIAQAPPVAQEALKKELETLTTNYQWLCTRLNGKCKTLEEVWACWHELLSYLEKANKWLNEVEFKLKTTENIPGGAEEISEVLDSLENLMRHSEDNPNQIRILAQTLTDGGVMDELINEELETFNSRWRELHEEAVRRQKLLEQSIQSAQETEKSLHLIQESLTFIDKQLAAYIADKVDAAQMPQEAQKIQSDLTSHEISLEEMKKHNQGKEAAQRVLSQIDVAQKKLQDVSMKFRLFQKPANFELRLQESKMILDEVKMHLPALETKSVEQEVVQSQLNHCVNLYKSLSEVKSEVEMVIKTGRQIVQKKQTENPKELDERVTALKLHYNELGAKVTERKQQLEKCLKLSRKMRKEMNVLTEWLAATDMELTKRSAVEGMPSNLDSEVAWGKATQKEIEKQKVHLKSITEVGEALKTVLGKKETLVEDKLSLLNSNWIAVTSRAEEWLNLLLEYQKHMETFDQNVDHITKWIIQADTLLDESEKKKPQQKEDVLKRLKAELNDIRPKVDSTRDQAANLMANRGDHCRKLVEPQISELNHRFAAISHRIKTGKASIPLKELEQFNSDIQKLLEPLEAEIQQGVNLKEEDFNKDMNEDNEGTVKELLQRGDNLQQRITDERKREEIKIKQQLLQTKHNALKDLRSQRRKKALEISHQWYQYKRQADDLLKCLDDIEKKLASLPEPRDERKIKEIDRELQKKKEELNAVRRQAEGLSEDGAAMAVEPTQIQLSKRWREIESKFAQFRRLNFAQIHTVREETMMVMTEDMPLEISYVPSTYLTEITHVSQALLEVEQLLNAPDLCAKDFEDLFKQEESLKNIKDSLQQSSGRIDIIHSKKTAALQSATPVERVKLQEALSQLDFQWEKVNKMYKDRQGRFDRSVEKWRRFHYDIKIFNQWLTEAEQFLRKTQIPENWEHAKYKWYLKELQDGIGQRQTVVRTLNATGEEIIQQSSKTDASILQEKLGSLNLRWQEVCKQLSDRKKRLEEQKNILSEFQRDLNEFVLWLEEADNIASIPLEPGKEQQLKEKLEQVKLLVEELPLRQGILKQLNETGGPVLVSAPISPEEQDKLENKLKQTNLQWIKVSRALPEKQGEIEAQIKDLGQLEKKLEDLEEQLNHLLLWLSPIRNQLEIYNQPNQEGPFDVQETEIAVQAKQPDVEEILSKGQHLYKEKPATQPVKRKLEDLSSEWKAVNRLLQELRAKQPDLAPGLTTIGASPTQTVTLVTQPVVTKETAISKLEMPSSLMLEVPALADFNRAWTELTDWLSLLDQVIKSQRVMVGDLEDINEMIIKQKATMQDLEQRRPQLEELITAAQNLKNKTSNQEARTIITDRIERIQNQWDEVQEHLQNRRQQLNEMLKDSTQWLEAKEEAEQVLGQARAKLESWKEGPYTVDAIQKKITETKQLAKDLRQWQTNVDVANDLALKLLRDYSADDTRKVHMITENINASWRSIHKRVSEREAALEETHRLLQQFPLDLEKFLAWLTEAETTANVLQDATRKERLLEDSKGVKELMKQWQDLQGEIEAHTDVYHNLDENSQKILRSLEGSDDAVLLQRRLDNMNFKWSELRKKSLNIRSHLEASSDQWKRLHLSLQELLVWLQLKDDELSRQAPIGGDFPAVQKQNDVHRAFKRELKTKEPVIMSTLETVRIFLTEQPLEGLEKLYQEPRELPPEERAQNVTRLLRKQAEEVNTEWEKLNLHSADWQRKIDETLERLQELQEATDELDLKLRQAEVIKGSWQPVGDLLIDSLQDHLEKVKALRGEIAPLKENVSHVNDLARQLTTLGIQLSPYNLSTLEDLNTRWKLLQVAVEDRVRQLHEAHRDFGPASQHFLSTSVQGPWERAISPNKVPYYINHETQTTCWDHPKMTELYQSLADLNNVRFSAYRTAMKLRRLQKALCLDLLSLSAACDALDQHNLKQNDQPMDILQIINCLTTIYDRLEQEHNNLVNVPLCVDMCLNWLLNVYDTGRTGRIRVLSFKTGIISLCKAHLEDKYRYLFKQVASSTGFCDQRRLGLLLHDSIQIPRQLGEVASFGGSNIEPSVRSCFQFANNKPEIEAALFLDWMRLEPQSMVWLPVLHRVAAAETAKHQAKCNICKECPIIGFRYRSLKHFNYDICQSCFFSGRVAKGHKMHYPMVEYCTPTTSGEDVRDFAKVLKNKFRTKRYFAKHPRMGYLPVQTVLEGDNMETPVTLINFWPVDSAPASSPQLSHDDTHSRIEHYASRLAEMENSNGSYLNDSISPNESIDDEHLLIQHYCQSLNQDSPLSQPRSPAQILISLESEERGELERILADLEEENRNLQAEYDRLKQQHEHKGLSPLPSPPEMMPTSPQSPRDAELIAEAKLLRQHKGRLEARMQILEDHNKQLESQLHRLRQLLEQPQAEAKVNGTTVSSPSTSLQRSDSSQPMLLRVVGSQTSDSMGEEDLLSPPQDTSTGLEEVMEQLNNSFPSSRGRNTPGKPMREDTM

SEQ ID NO: 13 - DNA, 20 bp, Artificial Sequence
  gRNA targeting sequence
caccagagtaacagtctgag

SEQ ID NO: 14 - DNA, 113 bp, Artificial Sequence
  gRNA targeting sequence
caccagagtaacagtctgaggtttaagagctatgctggaaacagcatagcaagtttaaataaggctagtccgttatcaacttgaaaaagtggcaccgagtcggtgcttttttt

SEQ ID NO: 15 - DNA, 472 bp, Unknown
  U6 promoter
cgagtccaacacccgtgggaatcccatgggcaccatggcccctcgctccaaaaatgctttcgcgtcgcgcagacactgctcggtagtttcggggatcagcgtttgagtaagagcccgcgtctgaaccctccgcgccgccccggccccagtggaaagacgcgcaggcaaaacgcaccacgtgacggagcgtgaccgcgcgccgagcgcgcgccaaggtcgggcaggaagagggcctatttcccatgattccttcatatttgcatatacgatacaaggctgttagagagataattagaattaatttgactgtaaacacaaagatattagtacaaaatacgtgacgtagaaagtaataatttcttgggtagtttgcagttttaaaattatgttttaaaatggactatcatatgcttaccgtaacttgaaagtatttcgatttcttggctttatatatcttgtggaaaggacgaaa

SEQ ID NO: 16 - DNA, 108 bp, Unknown
  H1 promoter
cttcggcgcgcccatatttgcatgtcgctatgtgttctgggaaatcaccataaacgtgaaatgtctttggatttgggaatcttataagttctgtatgagaccacggta

SEQ ID NO: 17 - DNA, 251 bp, Unknown
  7SK promoter
tgacggcgcgccctgcagtatttagcatgccccacccatctgcaaggcattctggatagtgtcaaaacagccggaaatcaagtccgtttatctcaaactttagcattttgggaataaatgatatttgctatgctggttaaattagattttagttaaatttcctgctgaagctctagtacgataagtaacttgacctaagtgtaaagttgagatttccttcaggtttatatagcttgtgcgccgcctgggta

SEQ ID NO: 18 - DNA, 450 bp, Unknown
  CK8 promoter
ctagactagcatgctgcccatgtaaggaggcaaggcctggggacacccgagatgcctggttataattaacccagacatgtggctgcccccccccccccaacacctgctgcctctaaaaataaccctgcatgccatgttcccggcgaagggccagctgtcccccgccagctagactcagcacttagtttaggaaccagtgagcaagtcagcccttggggcagcccatacaaggccatggggctgggcaagctgcacgcctgggtccggggtgggcacggtgcccgggcaacgagctgaaagctcatctgctctcaggggcccctccctggggacagcccctcctggctagtcacaccctgtaggctcctctatataacccaggggcacaggggctgccctcattctaccaccacctccacagcacagacagacactcaggagccagccagc

SEQ ID NO: 19 - DNA, 436 bp, Unknown
  CK8e promoter
tgcccatgtaaggaggcaaggcctggggacacccgagatgcctggttataattaacccagacatgtggctgcccccccccccccaacacctgctgcctctaaaaataaccctgcatgccatgttcccggcgaagggccagctgtcccccgccagctagactcagcacttagtttaggaaccagtgagcaagtcagcccttggggcagcccatacaaggccatggggctgggcaagctgcacgcctgggtccggggtgggcacggtgcccgggcaacgagctgaaagctcatctgctctcaggggcccctccctggggacagcccctcctggctagtcacaccctgtaggctcctctatataacccaggggcacaggggctgccctcattctaccaccacctccacagcacagacagacactcaggagccagccagc

SEQ ID NO: 20 - DNA, 2996 bp, Artificial Sequence
  Stuffer sequence
gcccctgttgtcttgactgccaggtctcctcaagggcccctggggccctcaaatacaacctgtcaccctgagcaagactatactgaccttctacccagccagactttccccagggcctcgcgcccacttctgttcccagagccacctggccttgcaatctgtatgcagtgtatggggcagggagggctggacagggcttttgttggggaaccacaaatacctctcgttaggccccagttccaggactgcaccccttgtgctctctactacaccttcaggtcagccaggctgggggacaccacctgctattccttttgaaggatgtagctgctccccactgactggctctgaagtagggctcccccagtcccttcttcaaagatgccaacagccccttttttttctctctctctttttttctttttgagcaagagtcttgctgtgtcacccaggctggacaacagcagtgtgatcacggcttactgcagcctggacttcctgagctcaagcgatcctcccacctcagcctcccaagtagctgggaccacaggttcacaccaccatgcctggctagctttttattttttgtagagacaaggtctttctgtgttgctgaggctggtcttgaatttctgggctcaattgctcctcctgctacctcagcctcccaaagtgttgggattacagatgtgagccaatggcctctttctattaactccttccaatactatttttatacacaggagccaattcaggaaaaataatgtttggaaaaatggaaagatctgttctgtgcttcgataagaaggttcaatactctgaagagaagtcaattcattttccattcatctataatttcaatgccatgcaatctcaattaaaataccaaataaaaattttaagagaattggagaagatgggaggggagtgtaagacgtatgaaaaaaattaggaggctgggcacagtgactccacctgtaatcccagcacttttggaggctgaggtgggaggatctcttgagcccaggagtttgagaccagcttgggcaatgtaacgagaccctgactctacaaaaaataaaaaattagcctggcatggtggtatgagcctgtagttccagctacttgggaggctgtggtgggaggatagcttgagcccaggaggtcgaggcttcagtgagctgagattgtaccactaactccagcctgggtgacagagtgagactctgtctcaaaaaaagaaaaaggaaaaaaattaggaaatcatagaaagaacatcaaaatatattagaaggctatgataattaacagatttgttaatgaagaggaaatatacaaatattaatgaacaaaatagtgtgtttagaacaagactcacatacaggagacatacacatgttaaaggaggcattttgaatttgtggggaaaacttacaaattcagtatagggtttggagcactttgatagctaagaggtggggtagggggcagagtgaaggctgtctctcttttactccttctaaaaatattccagtggatcaaagatgtaggaaacgatggatccatgtaggcctcagccttcaagtttctcctctgagatttcagggattatcctttaaaggagtcaggaagagggtagagatcacaaagataataagctcagacagtttgtatgttaaataaacctcaggaggttttagtcttaaggtccttaatctgaccttccaaactgacttttccagaaacttccaaaagcctctctggtgtctctttcttcccctcctttaatgtggccctggctcacaagtcacccctctctctaagaagtccccttctctgttttattcttcagctttgccccaggaggacctggggtgtagccccatgtcccctccctctgccactggtgactcatggtcatttcattcccctcagtcctcaaatagggtgaaccctacaggccccagaactaccccagtcaacctgtagagaaactccacaatgaccctcacaggaaatgaaattgaaagtcccatttccaatgtctttgtactgggatggaggaggagggatgggtaaggggcttcttatccttgagtctgttgggggccctggagtctgagccagcttctctgtgttggaaacacctggacagggctgggctcaggtggattagagggggtgtgtatatctgtgagtagtttctggaatccttctttcccctgaatgagttatgtgcacttatctgtcccaaaaaggataaagggacacatgggttaggggaggttttggaggcagttcccctcccaccccccagcccaccaaatgcttaggtatagactagtcactaaggtggaaggaatgtaggaatctcaggctctcagagtcagacctcagaaggctcccaggcaatgatccttgaggtgcagaaacccccttctcagccctgccccacatccttcatgagcattcctcaaactctgcctgacaatctccagagcccgagaactcaccgcttctttggtggccccttccagctggggacagttctgaaataaagctcttccttctcagcacacctgtctcctgtgactgctacccacttgtccccagagaagaaagaaggcccagagccaccctctatcccccaggtggggaaggattctttgagcacagcctgcctggaactagaaattctggttctaatctttgcctctcttcataagagctgagctgtgaccaagggaacccagagaatgggcaaatacaaaccaaaacagatttgggtttccaccggctgcagtggctcacatctataatcccagcactttgggaggccaaggtgggaggatcacttgagcccaggagtttgagaccagcctgggaaactgcaagacccgatctctacaaaacaaaacaaaaacccaacaacaggggcggggcacggtggctcacacctgtaatcccagcactttgggaggctgaggcgtgtggat

SEQ ID NO: 21 - protein, 1368 aa, Streptococcus pyogenes [sequence omitted]

SEQ ID NO: 22 - protein, 1050 aa, Staphylococcus aureus
MKRNYILGLDIGITSVGYGIIDYETRDVIDAGVRLFKEANVENNEGRRSKRGARRLKRRRRHRIQRVKKLLFDYNLLTDHSELSGINPYEARVKGLSQKLSEEEFSAALLHLAKRRGVHNVNEVEEDTGNELSTKEQISRNSKALEEKYVAELQLERLKKDGEVRGSINRFKTSDYVKEAKQLLKVQKAYHQLDQSFIDTYIDLLETRRTYYEGPGEGSPFGWKDIKEWYEMLMGHCTYFPEELRSVKYAYNADLYNALNDLNNLVITRDENEKLEYYEKFQIIENVFKQKKKPTLKQIAKEILVNEEDIKGYRVTSTGKPEFTNLKVYHDIKDITARKEIIENAELLDQIAKILTIYQSSEDIQEELTNLNSELTQEEIEQISNLKGYTGTHNLSLKAINLILDELWHTNDNQIAIFNRLKLVPKKVDLSQQKEIPTTLVDDFILSPVVKRSFIQSIKVINAIIKKYGLPNDIIIELAREKNSKDAQKMINEMQKRNRQTNERIEEIIRTTGKENAKYLIEKIKLHDMQEGKCLYSLEAIPLEDLLNNPFNYEVDHIIPRSVSFDNSFNNKVLVKQEENSKKGNRTPFQYLSSSDSKISYETFKKHILNLAKGKGRISKTKKEYLLEERDINRFSVQKDFINRNLVDTRYATRGLMNLLRSYFRVNNLDVKVKSINGGFTSFLRRKWKFKKERNKGYKHHAEDALIIANADFIFKEWKKLDKAKKVMENQMFEEKQAESMPEIETEQEYKEIFITPHQIKHIKDFKDYKYSHRVDKKPNRELINDTLYSTRKDDKGNTLIVNNLNGLYDKDNDKLKKLINKSPEKLLMYHHDPQTYQKLKLIMEQYGDEKNPLYKYYEETGNYLTKYSKKDNGPVIKKIKYYGNKLNAHLDITDDYPNSRNKVVKLSLKPYRFDVYLDNGVYKFVTVKNLDVIKKENYYEVNSKCYEEAKKLKKISNQAEFIASFYNNDLIKINGELYRVIGVNNDLLNRIEVNMIDITYREYLENMNDKRPPRIIKTIASKTQSIKKYSTDILGNLYEVKSKKHPQII

SEQ ID NO: 23 - protein, 1307 aa, Acidaminococcus sp. BV3L6
MTQFEGFTNLYQVSKTLRFELIPQGKTLKHIQEQGFIEEDKARNDHYKELKPIIDRIYKTYADQCLQLVQLDWENLSAAIDSYRKEKTEETRNALIEEQATYRNAIHDYFIGRTDNLTDAINKRHAEIYKGLFKAELFNGKVLKQLGTVTTTEHENALLRSFDKFTTYFSGFYENRKNVFSAEDISTAIPHRIVQDNFPKFKENCHIFTRLITAVPSLREHFENVKKAIGIFVSTSIEEVFSFPFYNQLLTQTQIDLYNQLLGGISREAGTEKIKGLNEVLNLAIQKNDETAHIIASLPHRFIPLFKQILSDRNTLSFILEEFKSDEEVIQSFCKYKTLLRNENVLETAEALFNELNSIDLTHIFISHKKLETISSALCDHWDTLRNALYERRISELTGKITKSAKEKVQRSLKHEDINLQEIISAAGKELSEAFKQKTSEILSHAHAALDQPLPTTLKKQEEKEILKSQLDSLLGLYHLLDWFAVDESNEVDPEFSARLTGIKLEMEPSLSFYNKARNYATKKPYSVEKFKLNFQMPTLASGWDVNKEKNNGAILFVKNGLYYLGIMPKQKGRYKALSFEPTEKTSEGFDKMYYDYFPDAAKMIPKCSTQLKAVTAHFQTHTTPILLSNNFIEPLEITKEIYDLNNPEKEPKKFQTAYAKKTGDQKGYREALCKWIDFTRDFLSKYTKTTSIDLSSLRPSSQYKDLGEYYAELNPLLYHISFQRIAEKEIMDAVETGKLYLFQIYNKDFAKGHHGKPNLHTLYWTGLFSPENLAKTSIKLNGQAELFYRPKSRMKRMAHRLGEKMLNKKLKDQKTPIPDTLYQELYDYVNHRLSHDLSDEARALLPNVITKEVSHEIIKDRRFTSDKFFFHVPITLNYQAANSPSKFNQRVNAYLKEHPETPIIGIDRGERNLIYITVIDSTGKILEQRSLNTIQQFDYQKKLDNREKERVAARQAWSVVGTIKDLKQGYLSQVIHEIVDLMIHYQAVVVLENLNFGFKSKRTGIAEKAVYQQFEKMLIDKLNCLVLKDYPAEKVGGVLNPYQLTDQFTSFAKMGTQSGFLFYVPAPYTSKIDPLTGFVDPFVWKTIKNHESRKHFLEGFDFLHYDVKTGDFILHFKMNRNLSFQRGLPGFMPAWDIVFEKNETQFDAKGTPFIAGKRIVPVIENHRFTGRYRDLYPANELIALLEEKGIVFRDGSNILPKLLENDDSHAIDTMVALIRSVLQMRNSNAATGEDYINSPVRDLNGVCFDSRFQNPEWPMDADANGAYHIALKGQLLLNHLKESKDLKLQNGISNQDWLAYIQELRN

SEQ ID NO: 24 - protein, 1228 aa, Lachnospiraceae bacterium ND2006
AASKLEKFTNCYSLSKTLRFKAIPVGKTQENIDNKRLLVEDEKRAEDYKGVKKLLDRYYLSFINDVLHSIKLKNLNNYISLFRKKTRTEKENKELENLEINLRKEIAKAFKGAAGYKSLFKKDIIETILPEAADDKDEIALVNSFNGFTTAFTGFFDNRENMFSEEAKSTSIAFRCINENLTRYISNMDIFEKVDAIFDKHEVQEIKEKILNSDYDVEDFFEGEFFNFVLTQEGIDVYNAIIGGFVTESGEKIKGLNEYINLYNAKTKQALPKFKPLYKQVLSDRESLSFYGEGYTSDEEVLEVFRNTLNKNSEIFSSIKKLEKLFKNFDEYSSAGIFVKNGPAISTISKDIFGEWNLIRDKWNAEYDDIHLKKKAVVTEKYEDDRRKSFKKIGSFSLEQLQEYADADLSVVEKLKEIIIQKVDEIYKVYGSSEKLFDADFVLEKSLKKNDAVVAIMKDLLDSVKSFENYIKAFFGEGKETNRDESFYGDFVLAYDILLKVDHIYDAIRNYVTQKPYSKDKFKLYFQNPQFMGGWDKDKETDYRATILRYGSKYYLAIMDKKYAKCLQKIDKDDVNGNYEKINYKLLPGPNKMLPKVFFSKKWMAYYNPSEDIQKIYKNGTFKKGDMFNLNDCHKLIDFFKDSISRYPKWSNAYDFNFSETEKYKDIAGFYREVEEQGYKVSFESASKKEVDKLVEEGKLYMFQIYNKDFSDKSHGTPNLHTMYFKLLFDENNHGQIRLSGGAELFMRRASLKKEELVVHPANSPIANKNPDNPKKTTTLSYDVYKDKRFSEDQYELHIPIAINKCPKNIFKINTEVRVLLKHDDNPYVIGIDRGERNLLYIVVVDGKGNIVEQYSLNEIINNFNGIRIKTDYHSLLDKKEKERFEARQNWTSIENIKELKAGYISQVVHKICELVEKYDAVIALEDLNSGFKNSRVKVEKQVYQKFEKMLIDKLNYMVDKKSNPCATGGALKGYQITNKFESFKSMSTQNGFIFYIPAWLTSKIDPSTGFVNLLKTKYTSIADSKKFISSFDRIMYVPEEDLFEFALDYKNFSRTDADYIKKWKLYSYGNRIRIFAAAKKNNVFAWEEVCLTSAYKELFNKYGINYQQGDIRALLCEQSDKAFYSSFMALMSLMLQMRNSITGRTDVDFLISPVKNSDGIFYDSRNYEAQENAILPKNADANGAYNIARKVLWAIGQFKKAEDEKLDKVKIAISNKEWLEYAQTSVK

SEQ ID NO: 25 - DNA, 1521 bp, Artificial Sequence
  AAV Expression Cassette Construct 1
cctgcaggcagctgcgcgctcgctcgctcactgaggccgcccgggcaaagcccgggcgtcgggcgacctttggtcgcccggcctcagtgagcgagcgagcgcgcagagagggagtgggatctgatatcggcgcgcccctgggcgcgcccgagtccaacacccgtgggaatcccatgggcaccatggcccctcgctccaaaaatgctttcgcgtcgcgcagacactgctcggtagtttcggggatcagcgtttgagtaagagcccgcgtctgaaccctccgcgccgccccggccccagtggaaagacgcgcaggcaaaacgcaccacgtgacggagcgtgaccgcgcgccgagcgcgcgccaaggtcgggcaggaagagggcctatttcccatgattccttcatatttgcatatacgatacaaggctgttagagagataattagaattaatttgactgtaaacacaaagatattagtacaaaatacgtgacgtagaaagtaataatttcttgggtagtttgcagttttaaaattatgttttaaaatggactatcatatgcttaccgtaacttgaaagtatttcgatttcttggctttatatatcttgtggaaaggacgaaacaccgcaccagagtaacagtctgaggtttaagagctatgctggaaacagcatagcaagtttaaataaggctagtccgttatcaacttgaaaaagtggcaccgagtcggtgctttttttgcggccgcgcttcggcgcgcccatatttgcatgtcgctatgtgttctgggaaatcaccataaacgtgaaatgtctttggatttgggaatcttataagttctgtatgagaccacggtacaccgcaccagagtaacagtctgaggtttaagagctatgctggaaacagcatagcaagtttaaataaggctagtccgttatcaacttgaaaaagtggcaccgagtcggtgctttttttgcggccgctgacggcgcgccctgcagtatttagcatgccccacccatctgcaaggcattctggatagtgtcaaaacagccggaaatcaagtccgtttatctcaaactttagcattttgggaataaatgatatttgctatgctggttaaattagattttagttaaatttcctgctgaagctctagtacgataagtaacttgacctaagtgtaaagttgagatttccttcaggtttatatagcttgtgcgccgcctgggtacaccgcaccagagtaacagtctgaggtttaagagctatgctggaaacagcatagcaagtttaaataaggctagtccgttatcaacttgaaaaagtggcaccgagtcggtgctttttttgcggccgcgctgcggccgcctcgatcgacgatatcagatctaggaacccctagtgatggagttggccactccctctctgcgcgctcgctcgctcactgaggccgggcgaccaaaggtcgcccgacgcccgggctttgcccgggcggcctcagtgagcgagcgagcgcgcag

SEQ ID NO: 26 - DNA, 4533 bp, Artificial Sequence
  AAV Expression Cassette Construct 2
ctgcgcgctcgctcgctcactgaggccgcccgggcaaagcccgggcgtcgggcgacctttggtcgcccggcctcagtgagcgagcgagcgcgcagagagggagtggccaactccatcactaggggttcctagatctgatatcggcgcgcccctgggcgcgcccgagtccaacacccgtgggaatcccatgggcaccatggcccctcgctccaaaaatgctttcgcgtcgcgcagacactgctcggtagtttcggggatcagcgtttgagtaagagcccgcgtctgaaccctccgcgccgccccggccccagtggaaagacgcgcaggcaaaacgcaccacgtgacggagcgtgaccgcgcgccgagcgcgcgccaaggtcgggcaggaagagggcctatttcccatgattccttcatatttgcatatacgatacaaggctgttagagagataattagaattaatttgactgtaaacacaaagatattagtacaaaatacgtgacgtagaaagtaataatttcttgggtagtttgcagttttaaaattatgttttaaaatggactatcatatgcttaccgtaacttgaaagtatttcgatttcttggctttatatatcttgtggaaaggacgaaacaccgcaccagagtaacagtctgaggtttaagagctatgctggaaacagcatagcaagtttaaataaggctagtccgttatcaacttgaaaaagtggcaccgagtcggtgctttttttgcggccgcgcttcggcgcgcccatatttgcatgtcgctatgtgttctgggaaatcaccataaacgtgaaatgtctttggatttgggaatcttataagttctgtatgagaccacggtacaccgcaccagagtaacagtctgaggtttaagagctatgctggaaacagcatagcaagtttaaataaggctagtccgttatcaacttgaaaaagtggcaccgagtcggtgctttttttgcggccgctgacggcgcgccctgcagtatttagcatgccccacccatctgcaaggcattctggatagtgtcaaaacagccggaaatcaagtccgtttatctcaaactttagcattttgggaataaatgatatttgctatgctggttaaattagattttagttaaatttcctgctgaagctctagtacgataagtaacttgacctaagtgtaaagttgagatttccttcaggtttatatagcttgtgcgccgcctgggtacaccgcaccagagtaacagtctgaggtttaagagctatgctggaaacagcatagcaagtttaaataaggctagtccgttatcaacttgaaaaagtggcaccgagtcggtgctttttttgcggccgcgctgcggccgcctcgaggcccctgttgtcttgactgccaggtctcctcaagggcccctggggccctcaaatacaacctgtcaccctgagcaagactatactgaccttctacccagccagactttccccagggcctcgcgcccacttctgttcccagagccacctggccttgcaatctgtatgcagtgtatggggcagggagggctggacagggcttttgttggggaaccacaaatacctctcgttaggccccagttccaggactgcaccccttgtgctctctactacaccttcaggtcagccaggctgggggacaccacctgctattccttttgaaggatgtagctgctccccactgactggctctgaagtagggctcccccagtcccttcttcaaagatgccaacagccccttttttttctctctctctttttttctttttgagcaagagtcttgctgtgtcacccaggctggacaacagcagtgtgatcacggcttactgcagcctggacttcctgagctcaagcgatcctcccacctcagcctcccaagtagctgggaccacaggttcacaccaccatgcctggctagctttttattttttgtagagacaaggtctttctgtgttgctgaggctggtcttgaatttctgggctcaattgctcctcctgctacctcagcctcccaaagtgttgggattacagatgtgagccaatggcctctttctattaactccttccaatactatttttatacacaggagccaattcaggaaaaataatgtttggaaaaatggaaagatctgttctgtgcttcgataagaaggttcaatactctgaagagaagtcaattcattttccattcatctataatttcaatgccatgcaatctcaattaaaataccaaataaaaattttaagagaattggagaagatgggaggggagtgtaagacgtatgaaaaaaattaggaggctgggcacagtgactccacctgtaatcccagcacttttggaggctgaggtgggaggatctcttgagcccaggagtttgagaccagcttgggcaatgtaacgagaccctgactctacaaaaaataaaaaattagcctggcatggtggtatgagcctgtagttccagctacttgggaggctgtggtgggaggatagcttgagcccaggaggtcgaggcttcagtgagctgagattgtaccactaactccagcctgggtgacagagtgagactctgtctcaaaaaaagaaaaaggaaaaaaattaggaaatcatagaaagaacatcaaaatatattagaaggctatgataattaacagatttgttaatgaagaggaaatatacaaatattaatgaacaaaatagtgtgtttagaacaagactcacatacaggagacatacacatgttaaaggaggcattttgaatttgtggggaaaacttacaaattcagtatagggtttggagcactttgatagctaagaggtggggtagggggcagagtgaaggctgtctctcttttactccttctaaaaatattccagtggatcaaagatgtaggaaacgatggatccatgtaggcctcagccttcaagtttctcctctgagatttcagggattatcctttaaaggagtcaggaagagggtagagatcacaaagataataagctcagacagtttgtatgttaaataaacctcaggaggttttagtcttaaggtccttaatctgaccttccaaactgacttttccagaaacttccaaaagcctctctggtgtctctttcttcccctcctttaatgtggccctggctcacaagtcacccctctctctaagaagtccccttctctgttttattcttcagctttgccccaggaggacctggggtgtagccccatgtcccctccctctgccactggtgactcatggtcatttcattcccctcagtcctcaaatagggtgaaccctacaggccccagaactaccccagtcaacctgtagagaaactccacaatgaccctcacaggaaatgaaattgaaagtcccatttccaatgtctttgtactgggatggaggaggagggatgggtaaggggcttcttatccttgagtctgttgggggccctggagtctgagccagcttctctgtgttggaaacacctggacagggctgggctcaggtggattagagggggtgtgtatatctgtgagtagtttctggaatccttctttcccctgaatgagttatgtgcacttatctgtcccaaaaaggataaagggacacatgggttaggggaggttttggaggcagttcccctcccaccccccagcccaccaaatgcttaggtatagactagtcactaaggtggaaggaatgtaggaatctcaggctctcagagtcagacctcagaaggctcccaggcaatgatccttgaggtgcagaaacccccttctcagccctgccccacatccttcatgagcattcctcaaactctgcctgacaatctccagagcccgagaactcaccgcttctttggtggccccttccagctggggacagttctgaaataaagctcttccttctcagcacacctgtctcctgtgactgctacccacttgtccccagagaagaaagaaggcccagagccaccctctatcccccaggtggggaaggattctttgagcacagcctgcctggaactagaaattctggttctaatctttgcctctcttcataagagctgagctgtgaccaagggaacccagagaatgggcaaatacaaaccaaaacagatttgggtttccaccggctgcagtggctcacatctataatcccagcactttgggaggccaaggtgggaggatcacttgagcccaggagtttgagaccagcctgggaaactgcaagacccgatctctacaaaacaaaacaaaaacccaacaacaggggcggggcacggtggctcacacctgtaatcccagcactttgggaggctgaggcgtgtggatgtcgacgatatcagatctaggaacccctagtgatggagttggccactccctctctgcgcgctcgctcgctcactgaggccgggcgaccaaaggtcgcccgacgcccgggctttgcccgggcggcctcagtgagcgagcgagcgcgcag

SEQ ID NO: 27 - DNA, 145 bp, Adeno-associated virus 2
ttggccactccctctctgcgcgctcgctcgctcactgaggccgggcgaccaaaggtcgcccgacgcccgggctttgcccgggcggcctcagtgagcgagcgagcgcgcagagagggagtggccaactccatcactaggggttcct

SEQ ID NO: 28 - DNA, 145 bp, Adeno-associated virus 2
aggaacccctagtgatggagttggccactccctctctgcgcgctcgctcgctcactgaggccgcccgggcaaagcccgggcgtcgggcgacctttggtcgcccggcctcagtgagcgagcgagcgcgcagagagggagtggccaa

SEQ ID NO: 29 - DNA, 24 bp, Homo sapiens
tctttttcttcttttttccttttt

SEQ ID NO: 30 - DNA, 24 bp, Homo sapiens
ctttttcttcttttttcctttttg

SEQ ID NO: 31 - DNA, 24 bp, Homo sapiens
tttttcttcttttttcctttttgc

SEQ ID NO: 32 - DNA, 24 bp, Homo sapiens
tcttcttttttcctttttgcaaaa

SEQ ID NO: 33 - DNA, 24 bp, Homo sapiens
cttcttttttcctttttgcaaaaa

SEQ ID NO: 34 - DNA, 24 bp, Homo sapiens
ttcttttttcctttttgcaaaaac

SEQ ID NO: 35 - DNA, 24 bp, Homo sapiens
ttcctttttgcaaaaacccaaaat

SEQ ID NO: 36 - DNA, 24 bp, Homo sapiens
tcctttttgcaaaaacccaaaata

SEQ ID NO: 37 - DNA, 24 bp, Homo sapiens
cctttttgcaaaaacccaaaatat

SEQ ID NO: 38 - DNA, 24 bp, Homo sapiens
ctttttgcaaaaacccaaaatatt

SEQ ID NO: 39 - DNA, 24 bp, Homo sapiens
tgcaaaaacccaaaatattttagc

SEQ ID NO: 40 - DNA, 24 bp, Homo sapiens
gcaaaaacccaaaatattttagct

SEQ ID NO: 41 - DNA, 24 bp, Homo sapiens
caaaaacccaaaatattttagctc

SEQ ID NO: 42 - DNA, 24 bp, Homo sapiens
agctcctactcagactgttactct

SEQ ID NO: 43 - DNA, 24 bp, Homo sapiens
gctcctactcagactgttactctg

SEQ ID NO: 44 - DNA, 24 bp, Homo sapiens
cttagtaaccacaggttgtgtcac

SEQ ID NO: 45 - DNA, 24 bp, Homo sapiens
gagatggcagtttccttagtaacc

SEQ ID NO: 46 - DNA, 24 bp, Homo sapiens
tagtttggagatggcagtttcctt

SEQ ID NO: 47 - DNA, 24 bp, Homo sapiens
ttctcataccttctgcttgatgat

SEQ ID NO: 48 - DNA, 24 bp, Homo sapiens
tcattttttctcataccttctgct

SEQ ID NO: 49 - DNA, 24 bp, Homo sapiens
atcattttttctcataccttctgc

SEQ ID NO: 50 - DNA, 24 bp, Homo sapiens
aagaaaaacttctgccaactttta

SEQ ID NO: 51 - DNA, 24 bp, Homo sapiens
aaagaaaaacttctgccaactttt

SEQ ID NO: 52 - DNA, 24 bp, Homo sapiens
tctttaaaatgaagattttccacc

SEQ ID NO: 53 - DNA, 24 bp, Homo sapiens
ctttaaaatgaagattttccacca

SEQ ID NO: 54 - DNA, 24 bp, Homo sapiens
tttaaaatgaagattttccaccaa

SEQ ID NO: 55 - DNA, 24 bp, Homo sapiens
aaatgaagattttccaccaatcac

SEQ ID NO: 56 - DNA, 24 bp, Homo sapiens
ccaccaatcactttactctcctag

SEQ ID NO: 57 - DNA, 24 bp, Homo sapiens
caccaatcactttactctcctaga

SEQ ID NO: 58 - DNA, 24 bp, Homo sapiens
ctctcctagaccatttcccaccag

SEQ ID NO: 59 - DNA, 24 bp, Homo sapiens
agaaaagattaaacagtgtgctac

SEQ ID NO: 60 - DNA, 24 bp, Homo sapiens
tttgagaaaagattaaacagtgtg

SEQ ID NO: 61 - DNA, 24 bp, Homo sapiens
atttgagaaaagattaaacagtgt

SEQ ID NO: 62 - DNA, 24 bp, Homo sapiens
tatttgagaaaagattaaacagtg

SEQ ID NO: 63 - DNA, 24 bp, Homo sapiens
atcttttctcaaataaaaagacat

SEQ ID NO: 64 - DNA, 24 bp, Homo sapiens
ctcaaataaaaagacatggggctt

SEQ ID NO: 65 - DNA, 24 bp, Homo sapiens
tcaaataaaaagacatggggcttc

SEQ ID NO: 66 - DNA, 24 bp, Homo sapiens
tgttttgcctttttggtatcttac

SEQ ID NO: 67 - DNA, 24 bp, Homo sapiens
gttttgcctttttggtatcttaca

SEQ ID NO: 68 - DNA, 24 bp, Homo sapiens
ttttgcctttttggtatcttacag

SEQ ID NO: 69 - DNA, 24 bp, Homo sapiens
gcctttttggtatcttacaggaac

SEQ ID NO: 70 - DNA, 24 bp, Homo sapiens
cctttttggtatcttacaggaact

SEQ ID NO: 71 - DNA, 24 bp, Homo sapiens
tggtatcttacaggaactccagga

SEQ ID NO: 72 - DNA, 24 bp, Homo sapiens
ggtatcttacaggaactccaggat

SEQ ID NO: 73 - DNA, 24 bp, Homo sapiens
aggattgctgaattatttcttccc

SEQ ID NO: 74 - DNA, 24 bp, Homo sapiens
gaggattgctgaattatttcttcc

SEQ ID NO: 75 - DNA, 24 bp, Homo sapiens
tgaggattgctgaattatttcttc

SEQ ID NO: 76 - DNA, 24 bp, Homo sapiens
ctgtagaatactggcatctgtttt

SEQ ID NO: 77 - DNA, 24 bp, Homo sapiens
cctgtagaatactggcatctgttt

SEQ ID NO: 78 - DNA, 24 bp, Homo sapiens
tcctgtagaatactggcatctgtt

SEQ ID NO: 79 - DNA, 24 bp, Homo sapiens
cagacctcctgccaccgcagattc

SEQ ID NO: 80 - DNA, 24 bp, Homo sapiens
tgtctgacagctgtttgcagacct

SEQ ID NO: 81 - DNA, 24 bp, Homo sapiens
ctgtctgacagctgtttgcagacc

SEQ ID NO: 82 - DNA, 24 bp, Homo sapiens
tctgtctgacagctgtttgcagac

SEQ ID NO: 83 - DNA, 24 bp, Homo sapiens
ttctgtctgacagctgtttgcaga

SEQ ID NO: 84 - DNA, 24 bp, Homo sapiens
attcctattagatctgtcgcccta

SEQ ID NO: 85 - DNA, 24 bp, Homo sapiens
cattcctattagatctgtcgccct

SEQ ID NO: 86 - DNA, 24 bp, Homo sapiens
agcagactttttaagctttcttta

SEQ ID NO: 87 - DNA, 24 bp, Homo sapiens
gcagactttttaagctttctttag

SEQ ID NO: 88 - DNA, 24 bp, Homo sapiens
taagctttctttagaagaatattt

SEQ ID NO: 89 - DNA, 24 bp, Homo sapiens
aagctttctttagaagaatatttc

SEQ ID NO: 90 - DNA, 24 bp, Homo sapiens
agctttctttagaagaatatttca

SEQ ID NO: 91 - DNA, 24 bp, Homo sapiens
tttagaagaatatttcatgagaga

SEQ ID NO: 92 - DNA, 24 bp, Homo sapiens
gaagaatatttcatgagagattat

SEQ ID NO: 93 - DNA, 24 bp, Homo sapiens
tcagtataaccaaaaaatatacgc

SEQ ID NO: 94 - DNA, 24 bp, Homo sapiens
acataatccatctatttttcttga

SEQ ID NO: 95 - DNA, 24 bp, Homo sapiens
cataatccatctatttttcttgat

SEQ ID NO: 96 - DNA, 24 bp, Homo sapiens
tcttgatccatatgcttttacctg

SEQ ID NO: 97 - DNA, 24 bp, Homo sapiens
cttgatccatatgcttttacctgc

SEQ ID NO: 98 - DNA, 24 bp, Homo sapiens
ttgatccatatgcttttacctgca

SEQ ID NO: 99 - DNA, 24 bp, Homo sapiens
tcaacagatctgtcaaatcgcctg

SEQ ID NO: 100 - DNA, 24 bp, Homo sapiens
acctgcaggcgatttgacagatct

SEQ ID NO: 101 - DNA, 24 bp, Homo sapiens
cctgcaggcgatttgacagatctg

SEQ ID NO: 102 - DNA, 24 bp, Homo sapiens
acagatctgttgagaaatggcggc

SEQ ID NO: 103 - DNA, 24 bp, Homo sapiens
tatcataatgaaaacgccgccatt

SEQ ID NO: 104 - DNA, 24 bp, Homo sapiens
cattatgatataaagatatttaat

SEQ ID NO: 105 - DNA, 24 bp, Homo sapiens
tatttagcatgttcccaattctca

SEQ ID NO: 106 - DNA, 24 bp, Homo sapiens
gaaaaaacaaatcaaagacttacc

SEQ ID NO: 107 - DNA, 24 bp, Homo sapiens
atttgttttttcgaaattgtattt

SEQ ID NO: 108 - DNA, 24 bp, Homo sapiens
ttttttcgaaattgtatttatctt

SEQ ID NO: 109 - DNA, 24 bp, Homo sapiens
ttcgaaattgtatttatcttcagc

SEQ ID NO: 110 - DNA, 24 bp, Homo sapiens
tcgaaattgtatttatcttcagca

SEQ ID NO: 111 - DNA, 24 bp, Homo sapiens
cgaaattgtatttatcttcagcac

SEQ ID NO: 112 - DNA, 24 bp, Homo sapiens
gaaattgtatttatcttcagcaca

SEQ ID NO: 113 - DNA, 24 bp, Homo sapiens
agaagttaaagagtccagatgtgc

SEQ ID NO: 114 - DNA, 24 bp, Homo sapiens
tcttcagcacatctggactcttta

SEQ ID NO: 115 - DNA, 24 bp, Homo sapiens
catcacccttcagaacctgatctt

SEQ ID NO: 116 - DNA, 24 bp, Homo sapiens
acttcttaaagatcaggttctgaa

SEQ ID NO: 117 - DNA, 24 bp, Homo sapiens
gactgttgttgtcatcattatatt

SEQ ID NO: 118 - DNA, 24 bp, Homo sapiens
actgttgttgtcatcattatatta

SEQ ID NO: 119 - DNA, 24 bp, Homo sapiens
aactagaataaaaggaaaaataaa

SEQ ID NO: 120 - DNA, 24 bp, Homo sapiens
ctactatatatttatttttccttt

SEQ ID NO: 121 - DNA, 24 bp, Homo sapiens
tttttccttttattctagttgaaa

SEQ ID NO: 122 - DNA, 24 bp, Homo sapiens
tccttttattctagttgaaagaat

SEQ ID NO: 123 - DNA, 24 bp, Homo sapiens
ccttttattctagttgaaagaatt

SEQ ID NO: 124 - DNA, 24 bp, Homo sapiens
cttttattctagttgaaagaattc

SEQ ID NO: 125 - DNA, 24 bp, Homo sapiens
attctagttgaaagaattcagaat

SEQ ID NO: 126 - DNA, 24 bp, Homo sapiens
ttctagttgaaagaattcagaatc

SEQ ID NO: 127 - DNA, 24 bp, Homo sapiens
attcaactgttgcctccggttctg

SEQ ID NO: 128 - DNA, 24 bp, Homo sapiens
acatttcattcaactgttgcctcc

SEQ ID NO: 129 - DNA, 24 bp, Homo sapiens
cttttggattgcatctactgtata

SEQ ID NO: 130 - DNA, 24 bp, Homo sapiens
tgtgattttcttttggattgcatc

SEQ ID NO: 131 - DNA, 24 bp, Homo sapiens
atactaaccttggtttctgtgatt

SEQ ID NO: 132 - DNA, 24 bp, Homo sapiens
aaaaggtatctttgatactaacct

SEQ ID NO: 133 - DNA, 24 bp, Homo sapiens
aaaaaggtatctttgatactaacc

SEQ ID NO: 134 - DNA, 24 bp, Homo sapiens
ttttaaaaaggtatctttgatact

SEQ ID NO: 135 - DNA, 24 bp, Homo sapiens
attttaaaaaggtatctttgatac

SEQ ID NO: 136 - DNA, 24 bp, Homo sapiens
ttaatgcaaactgggacacaaaca

SEQ ID NO: 137 - DNA, 24 bp, Homo sapiens
taaattgccatgtttgtgtcccag

SEQ ID NO: 138 - DNA, 24 bp, Homo sapiens
aaattgccatgtttgtgtcccagt

SEQ ID NO: 139 - DNA, 24 bp, Homo sapiens
aattgccatgtttgtgtcccagtt

SEQ ID NO: 140 - DNA, 24 bp, Homo sapiens
tgtcccagtttgcattaacaaata

SEQ ID NO: 141 - DNA, 24 bp, Homo sapiens
caacatagttctcaaactatttgt

SEQ ID NO: 142 - DNA, 24 bp, Homo sapiens
ccaacatagttctcaaactatttg

SEQ ID NO: 143 - DNA, 24 bp, Homo sapiens
tccaacatagttctcaaactattt

SEQ ID NO: 144 - DNA, 24 bp, Homo sapiens
tttccaacatagttctcaaactat

SEQ ID NO: 145 - DNA, 24 bp, Homo sapiens
ttttccaacatagttctcaaacta

SEQ ID NO: 146 - DNA, 24 bp, Homo sapiens
tttttccaacatagttctcaaact

SEQ ID NO: 147 - DNA, 24 bp, Homo sapiens
cattaacaaatagtttgagaacta

SEQ ID NO: 148 - DNA, 24 bp, Homo sapiens
agaactatgttggaaaaaaaaata

SEQ ID NO: 149 - DNA, 24 bp, Homo sapiens
gttcttctagcctggagaaagaag

SEQ ID NO: 150 - DNA, 24 bp, Homo sapiens
attcttctttctccaggctagaag

SEQ ID NO: 151 - DNA, 24 bp, Homo sapiens
ttcttctttctccaggctagaaga

SEQ ID NO: 152 - DNA, 24 bp, Homo sapiens
tccaggctagaagaacaaaagaat

SEQ ID NO: 153 - DNA, 24 bp, Homo sapiens
aaattctgacaagatattcttttg

SEQ ID NO: 154 - DNA, 24 bp, Homo sapiens
cttttagttgctgctcttttccag

SEQ ID NO: 155 - DNA, 24 bp, Homo sapiens
agaaaataaaattaccttgacttg

SEQ ID NO: 156 - DNA, 24 bp, Homo sapiens
tgcaagcaggccctgggggatttg

SEQ ID NO: 157 - DNA, 24 bp, Homo sapiens
attttctcaaatcccccagggcct

SEQ ID NO: 158 - DNA, 24 bp, Homo sapiens
ttttctcaaatcccccagggcctg

SEQ ID NO: 159 - DNA, 24 bp, Homo sapiens
ctcaaatcccccagggcctgcttg

SEQ ID NO: 160 - DNA, 24 bp, Homo sapiens
tcaaatcccccagggcctgcttgc

SEQ ID NO: 161 - DNA, 24 bp, Homo sapiens
ttaattcaatcattggttttctgc

SEQ ID NO: 162 - DNA, 24 bp, Homo sapiens
taattcaatcattggttttctgcc

SEQ ID NO: 163 - DNA, 24 bp, Homo sapiens
aattcaatcattggttttctgccc

SEQ ID NO: 164 - DNA, 24 bp, Homo sapiens
attcaatcattggttttctgccca

SEQ ID NO: 165 - DNA, 24 bp, Homo sapiens
gcaaggaactatgaataacctaat

SEQ ID NO: 166 - DNA, 24 bp, Homo sapiens
ctgcccattaggttattcatagtt

SEQ ID NO: 167 - DNA, 24 bp, Homo sapiens
tgcccattaggttattcatagttc

SEQ ID NO: 168 - DNA, 24 bp, Homo sapiens
tagaaaacaatttaacaggaaata

SEQ ID NO: 169 - DNA, 24 bp, Homo sapiens
ctgttaaattgttttctataaacc

SEQ ID NO: 170 - DNA, 24 bp, Homo sapiens
gaaataaaaaagatgttactgtat

SEQ ID NO: 171 - DNA, 24 bp, Homo sapiens
agaaataaaaaagatgttactgta

SEQ ID NO: 172 - DNA, 24 bp, Homo sapiens
ctataaacccttatacagtaacat

SEQ ID NO: 173 - DNA, 24 bp, Homo sapiens
tataaacccttatacagtaacatc

SEQ ID NO: 174 - DNA, 24 bp, Homo sapiens
ttatttctaaaagtgttttggctg

SEQ ID NO: 175 - DNA, 24 bp, Homo sapiens
tatttctaaaagtgttttggctgg

SEQ ID NO: 176 - DNA, 24 bp, Homo sapiens
atttctaaaagtgttttggctggt

SEQ ID NO: 177 - DNA, 24 bp, Homo sapiens
tttctaaaagtgttttggctggtc

SEQ ID NO: 178 - DNA, 24 bp, Homo sapiens
taaaagtgttttggctggtctcac

SEQ ID NO: 179 - DNA, 24 bp, Homo sapiens
cataatacaaagtaaagtacaatt

SEQ ID NO: 180 - DNA, 24 bp, Homo sapiens
acataatacaaagtaaagtacaat

SEQ ID NO: 181 - DNA, 24 bp, Homo sapiens
ggctggtctcacaattgtacttta

SEQ ID NO: 182 - DNA, 24 bp, Homo sapiens
gctggtctcacaattgtactttac

SEQ ID NO: 183 - DNA, 24 bp, Homo sapiens
ctttgtattatgtaaaaggaatac

SEQ ID NO: 184 - DNA, 24 bp, Homo sapiens
tattatgtaaaaggaatacacaac

SEQ ID NO: 185 - DNA, 24 bp, Homo sapiens
ttcttacaggcaacaatgcaggat

SEQ ID NO: 186 - DNA, 24 bp, Homo sapiens
gaacagaggcgtccccagttggaa

SEQ ID NO: 187 - DNA, 24 bp, Homo sapiens
ggcagcggtaatgagttcttccaa

SEQ ID NO: 188 - DNA, 24 bp, Homo sapiens
tcaaattttgggcagcggtaatga

SEQ ID NO: 189 - DNA, 24 bp, Homo sapiens
aaaaacaagaccagcaatcaagag

SEQ ID NO: 190 - DNA, 24 bp, Homo sapiens
tgtgtcccatgcttgttaaaaaac

SEQ ID NO: 191 - DNA, 24 bp, Homo sapiens
ttaacaagcatgggacacacaaag

SEQ ID NO: 192 - DNA, 24 bp, Homo sapiens
taacaagcatgggacacacaaagc

SEQ ID NO: 193 - DNA, 24 bp, Homo sapiens
aacaagcatgggacacacaaagca

SEQ ID NO: 194 - DNA, 24 bp, Homo sapiens
acaagcatgggacacacaaagcaa

SEQ ID NO: 195 - DNA, 24 bp, Homo sapiens
ttgaaacttgtcatgcatcttgct

SEQ ID NO: 196 - DNA, 24 bp, Homo sapiens
attgaaacttgtcatgcatcttgc

SEQ ID NO: 197 - DNA, 24 bp, Homo sapiens
tattgaaacttgtcatgcatcttg

SEQ ID NO: 198 - DNA, 24 bp, Homo sapiens
aataaaaacttaagttcatatatc

SEQ ID NO: 199 - DNA, 24 bp, Homo sapiens
gtgaatatattattggatttctat

SEQ ID NO: 200 - DNA, 24 bp, Homo sapiens
aagataattcatgaacatcttaat

SEQ ID NO: 201 - DNA, 24 bp, Homo sapiens
acagaaaagcatacacattactta

SEQ ID NO: 202 - DNA, 24 bp, Homo sapiens
ctgttaaagaggaagttagaagat

SEQ ID NO: 203 - DNA, 24 bp, Homo sapiens
tgttaaagaggaagttagaagatc

SEQ ID NO: 204 - DNA, 24 bp, Homo sapiens
ccgccttccactcagagctcagat

SEQ ID NO: 205 - DNA, 24 bp, Homo sapiens
ccctcagctcttgaagtaaacggt

SEQ ID NO: 206 - DNA, 24 bp, Homo sapiens
cttcaagagctgagggcaaagcag

SEQ ID NO: 207 - DNA, 24 bp, Homo sapiens
aacaaatagctagagccaaagaga

SEQ ID NO: 208 - DNA, 24 bp, Homo sapiens
gaacaaatagctagagccaaagag

SEQ ID NO: 209 - DNA, 24 bp, Homo sapiens
gctctagctatttgttcaaaagtg

SEQ ID NO: 210 - DNA, 24 bp, Homo sapiens
ttcaaaagtgcaactatgaagtga

SEQ ID NO: 211 - DNA, 24 bp, Homo sapiens
tctctcacccagtcatcacttcat

SEQ ID NO: 212 - DNA, 24 bp, Homo sapiens
ctctctcacccagtcatcacttca

SEQ ID NO: 213 - DNA, 24 bp, Homo sapiens
tatatatatatatatttttctctt

SEQ ID NO: 214 - DNA, 24 bp, Homo sapiens
tctctttctatagacagctaattc

SEQ ID NO: 215 - DNA, 24 bp, Homo sapiens
ctctttctatagacagctaattca

SEQ ID NO: 216 - DNA, 24 bp, Homo sapiens
aaacagtaaaaaaatgaattagct

SEQ ID NO: 217 - DNA, 24 bp, Homo sapiens
tctttctatagacagctaattcat

SEQ ID NO: 218 - DNA, 24 bp, Homo sapiens
aaaacagtaaaaaaatgaattagc

SEQ ID NO: 219 - DNA, 24 bp, Homo sapiens
tatagacagctaattcattttttt

SEQ ID NO: 220 - DNA, 24 bp, Homo sapiens
tattctgtaatataaaaattttaa

SEQ ID NO: 221 - DNA, 24 bp, Homo sapiens
atattctgtaatataaaaatttta

SEQ ID NO: 222 - DNA, 24 bp, Homo sapiens
tttactgttttaaaatttttatat

SEQ ID NO: 223 - DNA, 24 bp, Homo sapiens
ttactgttttaaaatttttatatt

SEQ ID NO: 224 - DNA, 24 bp, Homo sapiens
tactgttttaaaatttttatatta

SEQ ID NO: 225 - DNA, 24 bp, Homo sapiens
actgttttaaaatttttatattac

SEQ ID NO: 226 - DNA, 24 bp, Homo sapiens
ctgttttaaaatttttatattaca

SEQ ID NO: 227 - DNA, 24 bp, Homo sapiens
aaaatttttatattacagaatata

SEQ ID NO: 228 - DNA, 24 bp, Homo sapiens
aaatttttatattacagaatataa

SEQ ID NO: 229 - DNA, 24 bp, Homo sapiens
ttgtagactatcttttatattctg

SEQ ID NO: 230 - DNA, 24 bp, Homo sapiens
tatattacagaatataaaagatag

SEQ ID NO: 231 - DNA, 24 bp, Homo sapiens
atattacagaatataaaagatagt

SEQ ID NO: 232 - DNA, 24 bp, Homo sapiens
tattacagaatataaaagatagtc

SEQ ID NO: 233 - DNA, 24 bp, Homo sapiens
caatgctgctgtcttcttgctatg

SEQ ID NO: 234 - DNA, 24 bp, Homo sapiens
caatgggaaaaagttaacaaaatg

SEQ ID NO: 235 - DNA, 24 bp, Homo sapiens
tgcaagtatcaagaaaaatatatg

SEQ ID NO: 236 - DNA, 24 bp, Homo sapiens
tcttgatacttgcagaaatgattt

SEQ ID NO: 237 - DNA, 24 bp, Homo sapiens
cttgatacttgcagaaatgatttg

SEQ ID NO: 238 - DNA, 24 bp, Homo sapiens
ttgatacttgcagaaatgatttgt

SEQ ID NO: 239 - DNA, 24 bp, Homo sapiens
ttttcagggaactgtagaatttat

SEQ ID NO: 240 - DNA, 24 bp, Homo sapiens
catggagggtactgaaataaattc

SEQ ID NO: 241 - DNA, 24 bp, Homo sapiens
ccatggagggtactgaaataaatt

SEQ ID NO: 242 - DNA, 24 bp, Homo sapiens
cagggaactgtagaatttatttca

SEQ ID NO: 243 - DNA, 24 bp, Homo sapiens
tccatggagggtactgaaataaat

SEQ ID NO: 244 - DNA, 24 bp, Homo sapiens
agggaactgtagaatttatttcag

SEQ ID NO: 245 - DNA, 24 bp, Homo sapiens
ttccatggagggtactgaaataaa

SEQ ID NO: 246 - DNA, 24 bp, Homo sapiens
cctgtcttttttccatggagggta

SEQ ID NO: 247 - DNA, 24 bp, Homo sapiens
ccctgtcttttttccatggagggt

SEQ ID NO: 248 - DNA, 24 bp, Homo sapiens
tccctgtcttttttccatggaggg

SEQ ID NO: 249 - DNA, 24 bp, Homo sapiens
tttcagtaccctccatggaaaaaa

SEQ ID NO: 250 - DNA, 24 bp, Homo sapiens
agtaccctccatggaaaaaagaca

SEQ ID NO: 251 - DNA, 24 bp, Homo sapiens
agtttgcatggttcttgctcaagg

SEQ ID NO: 252 - DNA, 24 bp, Homo sapiens
ataagaaaatgcattccttgagca

SEQ ID NO: 253 - DNA, 24 bp, Homo sapiens
cataagaaaatgcattccttgagc

SEQ ID NO: 254 - DNA, 24 bp, Homo sapiens
catggttcttgctcaaggaatgca

SEQ ID NO: 255 - DNA, 24 bp, Homo sapiens
acctacatgtggaaataaattttc

SEQ ID NO: 256 - DNA, 24 bp, Homo sapiens
gacctacatgtggaaataaatttt

SEQ ID NO: 257 - DNA, 24 bp, Homo sapiens
tgacctacatgtggaaataaattt

SEQ ID NO: 258 - DNA, 24 bp, Homo sapiens
cttatgaaaatttatttccacatg

SEQ ID NO: 259 - DNA, 24 bp, Homo sapiens
ttatgaaaatttatttccacatgt

SEQ ID NO: 260 - DNA, 24 bp, Homo sapiens
attacatttttgacctacatgtgg

SEQ ID NO: 261 - DNA, 24 bp, Homo sapiens
cattacatttttgacctacatgtg

SEQ ID NO: 262 - DNA, 24 bp, Homo sapiens
tcattacatttttgacctacatgt

SEQ ID NO: 263 - DNA, 24 bp, Homo sapiens
tttccacatgtaggtcaaaaatgt

SEQ ID NO: 264 - DNA, 24 bp, Homo sapiens
cacatgtaggtcaaaaatgtaatg

SEQ ID NO: 265 - DNA, 24 bp, Homo sapiens
ttgcaatccagccatgatattttt

SEQ ID NO: 266 - DNA, 24 bp, Homo sapiens
actgttggtttgttgcaatccagc

SEQ ID NO: 267 - DNA, 24 bp, Homo sapiens
cactgttggtttgttgcaatccag

SEQ ID NO: 268 - DNA, 24 bp, Homo sapiens
aatgctctcatccatagtcatagg

SEQ ID NO: 269 - DNA, 24 bp, Homo sapiens
atgtctcagtaatcttcttaccta

SEQ ID NO: 270 - DNA, 24 bp, Homo sapiens
caagttatttaatgtctcagtaat

SEQ ID NO: 271 - DNA, 24 bp, Homo sapiens
acaagttatttaatgtctcagtaa

SEQ ID NO: 272 - DNA, 24 bp, Homo sapiens
gactctgatgacatatttttcccc

SEQ ID NO: 273 - DNA, 24 bp, Homo sapiens
tccccagtatggttccagatcatg

SEQ ID NO: 274 - DNA, 24 bp, Homo sapiens
ccccagtatggttccagatcatgt

SEQ ID NO: 275 - DNA, 24 bp, Homo sapiens
cccagtatggttccagatcatgtc

SEQ ID NO: 276 - DNA, 24 bp, Homo sapiens
tatttgtctttgtgtatgtgtgta

SEQ ID NO: 277 - DNA, 24 bp, Homo sapiens
tctttgtgtatgtgtgtatgtgta

SEQ ID NO: 278 - DNA, 24 bp, Homo sapiens
tgtatgtgtgtatgtgtatgtgtt

SEQ ID NO: 279 - DNA, 24 bp, Homo sapiens
aggccagacctatttgactggaat

SEQ ID NO: 280 - DNA, 24 bp, Homo sapiens
ggccagacctatttgactggaata

SEQ ID NO: 281 - DNA, 24 bp, Homo sapiens
actggaatagtgtggtttgccagc

SEQ ID NO: 282 - DNA, 24 bp, Homo sapiens
ccagcagtcagccacacaacgact

SEQ ID NO: 283 - DNA, 24 bp, Homo sapiens
tctatgcctaattgatatctggcg

SEQ ID NO: 284 - DNA, 24 bp, Homo sapiens
ccaaccttcaggatcgagtagttt

SEQ ID NO: 285 - DNA, 24 bp, Homo sapiens
tggactaccactgcttttagtatg

SEQ ID NO: 286 - DNA, 24 bp, Homo sapiens
agtatggtagagtttaatgttttc

SEQ ID NO: 287 - DNA, 24 bp, Homo sapiens
gtatggtagagtttaatgttttca

SEQ ID NO: 288 - DNA, 24 bp, Homo sapiens
agactctaaaaggataatgaacaa

SEQ ID NO: 289 - DNA, 24 bp, Homo sapiens
actttgatttgttcattatccttt

SEQ ID NO: 290 - DNA, 24 bp, Homo sapiens
tatatttgagactctaaaaggata

SEQ ID NO: 291 - DNA, 24 bp, Homo sapiens
atttgttcattatccttttagagt

SEQ ID NO: 292 - DNA, 24 bp, Homo sapiens
gtttctatatttgagactctaaaa

SEQ ID NO: 293 - DNA, 24 bp, Homo sapiens
ggtttctatatttgagactctaaa

SEQ ID NO: 294 - DNA, 24 bp, Homo sapiens
tggtttctatatttgagactctaa

SEQ ID NO: 295 - DNA, 24 bp, Homo sapiens
ttcattatccttttagagtctcaa

SEQ ID NO: 296 - DNA, 24 bp, Homo sapiens
agagtctcaaatatagaaaccaaa

SEQ ID NO: 297 - DNA, 24 bp, Homo sapiens
gagtctcaaatatagaaaccaaaa

SEQ ID NO: 298 - DNA, 24 bp, Homo sapiens
cacttcctggatggcttcaatgct

SEQ ID NO: 299 - DNA, 24 bp, Homo sapiens
gcctcaacaagtgagcattgaagc

SEQ ID NO: 300 - DNA, 24 bp, Homo sapiens
cctcaacaagtgagcattgaagcc

SEQ ID NO: 301 - DNA, 24 bp, Homo sapiens
ggtggccttggcaacatttccact

SEQ ID NO: 302 - DNA, 24 bp, Homo sapiens
gtcactttaggtggccttggcaac

SEQ ID NO: 303 - DNA, 24 bp, Homo sapiens
atgatgtaactgaaaatgttcttc

SEQ ID NO: 304 - DNA, 24 bp, Homo sapiens
cctgttgagaatagtgcatttgat

SEQ ID NO: 305 - DNA, 24 bp, Homo sapiens
cagttacatcatcaaatgcactat

SEQ ID NO: 306 - DNA, 24 bp, Homo sapiens
agttacatcatcaaatgcactatt

SEQ ID NO: 307 - DNA, 24 bp, Homo sapiens
cacactttacctgttgagaatagt

SEQ ID NO: 308 - DNA, 24 bp, Homo sapiens
ctgttttatatgcatttttaggta

SEQ ID NO: 309 - DNA, 24 bp, Homo sapiens
tgttttatatgcatttttaggtat

SEQ ID NO: 310 - DNA, 24 bp, Homo sapiens
atatgcatttttaggtattacgtg

SEQ ID NO: 311 - DNA, 24 bp, Homo sapiens
tatgcatttttaggtattacgtgc

SEQ ID NO: 312 - DNA, 24 bp, Homo sapiens
taggtattacgtgcacatatatat

SEQ ID NO: 313 - DNA, 24 bp, Homo sapiens
aggtattacgtgcacatatatata

SEQ ID NO: 314 - DNA, 24 bp, Homo sapiens
ggtattacgtgcacatatatatat

SEQ ID NO: 315 - DNA, 24 bp, Homo sapiens
agcaacaactataatattgtgcag

SEQ ID NO: 316 - DNA, 24 bp, Homo sapiens
gttcctccatctttctctttttat

SEQ ID NO: 317 - DNA, 24 bp, Homo sapiens
tctttttatggagttcactaggtg

SEQ ID NO: 318 - DNA, 24 bp, Homo sapiens
tatggagttcactaggtgcaccat

SEQ ID NO: 319 - DNA, 24 bp, Homo sapiens
atggagttcactaggtgcaccatt

SEQ ID NO: 320 - DNA, 24 bp, Homo sapiens
tggagttcactaggtgcaccattc

SEQ ID NO: 321 - DNA, 24 bp, Homo sapiens
ataattgcatctgaacatttggtc

SEQ ID NO: 322 - DNA, 24 bp, Homo sapiens
gtcctttgcagggtgagtgagcga

SEQ ID NO: 323 - DNA, 24 bp, Homo sapiens
ttccaaagcagcctctcgctcact

SEQ ID NO: 324 - DNA, 24 bp, Homo sapiens
cagggtgagtgagcgagaggctgc

SEQ ID NO: 325 - DNA, 24 bp, Homo sapiens
gaagaaactcatagattactgcaa

SEQ ID NO: 326 - DNA, 24 bp, Homo sapiens
caggtccagggggaactgttgcag

SEQ ID NO: 327 - DNA, 24 bp, Homo sapiens
ccaggtccagggggaactgttgca

SEQ ID NO: 328 - DNA, 24 bp, Homo sapiens
agcttctgtaagccaggcaagaaa

SEQ ID NO: 329 - DNA, 24 bp, Homo sapiens
ttgcctggcttacagaagctgaaa

SEQ ID NO: 330 - DNA, 24 bp, Homo sapiens
cttacgggtagcatcctgtaggac

SEQ ID NO: 331 - DNA, 24 bp, Homo sapiens
ctcccttggagtcttctaggagcc

SEQ ID NO: 332 - DNA, 24 bp, Homo sapiens
actcccttggagtcttctaggagc

SEQ ID NO: 333 - DNA, 24 bp, Homo sapiens
atcagctcttttactcccttggag

SEQ ID NO: 334 - DNA, 24 bp, Homo sapiens
cgctttagcactcttgtggatcca

SEQ ID NO: 335 - DNA, 24 bp, Homo sapiens
gcactcttgtggatccaattgaac

SEQ ID NO: 336 - DNA, 24 bp, Homo sapiens
tccctggcttgtcagttacaagta

SEQ ID NO: 337 - DNA, 24 bp, Homo sapiens
gtccctggcttgtcagttacaagt

SEQ ID NO: 338 - DNA, 24 bp, Homo sapiens
ttttgtccctggcttgtcagttac

SEQ ID NO: 339 - DNA, 24 bp, Homo sapiens
gttttgtccctggcttgtcagtta

SEQ ID NO: 340 - DNA, 24 bp, Homo sapiens
tacttgtaactgacaagccaggga

SEQ ID NO: 341 - DNA, 24 bp, Homo sapiens
gctcctactcagactgttactctg

SEQ ID NO: 342 - DNA, 24 bp, Homo sapiens
taccatgtattgctaaacaaagta

SEQ ID NO: 343 - DNA, 24 bp, Homo sapiens
attgaagagtaacaatttgagcca

SEQ ID NO: 344 - DNA, 24 bp, Mus musculus
aggctctgcaaagttctttgaaag

SEQ ID NO: 345 - DNA, 24 bp, Mus musculus
aaagagcaacaaaatggcttcaac

SEQ ID NO: 346 - DNA, 24 bp, Mus musculus
aaagagcaataaaatggcttcaac

SEQ ID NO: 347 - DNA, 24 bp, Mus musculus
aaagaactttgcagagcctcaaaa

SEQ ID NO: 348 - DNA, 24 bp, Mus musculus
ctgaatatctatgcattaataact

SEQ ID NO: 349 - DNA, 24 bp, Mus musculus
tattatattacagggcatattata

SEQ ID NO: 350 - DNA, 24 bp, Mus musculus
aggtaagccgaggtttggccttta

SEQ ID NO: 351 - DNA, 24 bp, Mus musculus
cccagagtccttcaaagatattga

SEQ ID NO: 352 - RNA, 24 nt, Homo sapiens
aaaaaggaaaaaagaagaaaaaga

SEQ ID NO: 353 - RNA, 24 nt, Homo sapiens
caaaaaggaaaaaagaagaaaaag

SEQ ID NO: 354 - RNA, 24 nt, Homo sapiens
gcaaaaaggaaaaaagaagaaaaa

SEQ ID NO: 355 - RNA, 24 nt, Homo sapiens
uuuugcaaaaaggaaaaaagaaga

SEQ ID NO: 356 - RNA, 24 nt, Homo sapiens
uuuuugcaaaaaggaaaaaagaag

SEQ ID NO: 357 - RNA, 24 nt, Homo sapiens
guuuuugcaaaaaggaaaaaagaa

SEQ ID NO: 358 - RNA, 24 nt, Homo sapiens
auuuuggguuuuugcaaaaaggaa

SEQ ID NO: 359 - RNA, 24 nt, Homo sapiens
uauuuuggguuuuugcaaaaagga

SEQ ID NO: 360 - RNA, 24 nt, Homo sapiens
auauuuuggguuuuugcaaaaagg

SEQ ID NO: 361 - RNA, 24 nt, Homo sapiens
aauauuuuggguuuuugcaaaaag

SEQ ID NO: 362 - RNA, 24 nt, Homo sapiens
gcuaaaauauuuuggguuuuugca

SEQ ID NO: 363 - RNA, 24 nt, Homo sapiens
agcuaaaauauuuuggguuuuugc

SEQ ID NO: 364 - RNA, 24 nt, Homo sapiens
gagcuaaaauauuuuggguuuuug

SEQ ID NO: 365 - RNA, 24 nt, Homo sapiens
agaguaacagucugaguaggagcu

SEQ ID NO: 366 - RNA, 24 nt, Homo sapiens
cagaguaacagucugaguaggagc

SEQ ID NO: 367 - RNA, 24 nt, Homo sapiens
gugacacaaccugugguuacuaag

SEQ ID NO: 368 - RNA, 23 nt, Homo sapiens
gguuacuaaggaaacugccaucu

SEQ ID NO: 369 - RNA, 24 nt, Homo sapiens
aaggaaacugccaucuccaaacua

SEQ ID NO: 370 - RNA, 24 nt, Homo sapiens
aucaucaagcagaagguaugagaa

SEQ ID NO: 371 - RNA, 24 nt, Homo sapiens
agcagaagguaugagaaaaaauga

SEQ ID NO: 372 - RNA, 24 nt, Homo sapiens
gcagaagguaugagaaaaaaugau

SEQ ID NO: 373 - RNA, 24 nt, Homo sapiens
uaaaaguuggcagaaguuuuucuu

SEQ ID NO: 374 - RNA, 24 nt, Homo sapiens
aaaaguuggcagaaguuuuucuuu

SEQ ID NO: 375 - RNA, 24 nt, Homo sapiens
gguggaaaaucuucauuuuaaaga

SEQ ID NO: 376 - RNA, 24 nt, Homo sapiens
ugguggaaaaucuucauuuuaaag

SEQ ID NO: 377 - RNA, 24 nt, Homo sapiens
uugguggaaaaucuucauuuuaaa

SEQ ID NO: 378 - RNA, 24 nt, Homo sapiens
gugauugguggaaaaucuucauuu

SEQ ID NO: 379 - RNA, 24 nt, Homo sapiens
cuaggagaguaaagugauuggugg

SEQ ID NO: 380 - RNA, 24 nt, Homo sapiens
ucuaggagaguaaagugauuggug

SEQ ID NO: 381 - RNA, 23 nt, Homo sapiens
cuggugggaaauggucuaggaga

SEQ ID NO: 382 - RNA, 24 nt, Homo sapiens
guagcacacuguuuaaucuuuucu

SEQ ID NO: 383 - RNA, 24 nt, Homo sapiens
cacacuguuuaaucuuuucucaaa

SEQ ID NO: 384 - RNA, 24 nt, Homo sapiens
acacuguuuaaucuuuucucaaau

SEQ ID NO: 385 - RNA, 24 nt, Homo sapiens
cacuguuuaaucuuuucucaaaua

SEQ ID NO: 386 - RNA, 24 nt, Homo sapiens
augucuuuuuauuugagaaaagau

SEQ ID NO: 387 - RNA, 24 nt, Homo sapiens
aagccccaugucuuuuuauuugag

SEQ ID NO: 388 - RNA, 24 nt, Homo sapiens
gaagccccaugucuuuuuauuuga

SEQ ID NO: 389 - RNA, 24 nt, Homo sapiens
guaagauaccaaaaaggcaaaaca

SEQ ID NO: 390 - RNA, 24 nt, Homo sapiens
uguaagauaccaaaaaggcaaaac

SEQ ID NO: 391 - RNA, 24 nt, Homo sapiens
cuguaagauaccaaaaaggcaaaa

SEQ ID NO: 392 - RNA, 24 nt, Homo sapiens
guuccuguaagauaccaaaaaggc

SEQ ID NO: 393 - RNA, 24 nt, Homo sapiens
aguuccuguaagauaccaaaaagg

SEQ ID NO: 394 - RNA, 24 nt, Homo sapiens
uccuggaguuccuguaagauacca

SEQ ID NO: 395 - RNA, 24 nt, Homo sapiens
auccuggaguuccuguaagauacc

SEQ ID NO: 396 - RNA, 24 nt, Homo sapiens
gggaagaaauaauucagcaauccu

SEQ ID NO: 397 - RNA, 24 nt, Homo sapiens
ggaagaaauaauucagcaauccuc

SEQ ID NO: 398 - RNA, 24 nt, Homo sapiens
gaagaaauaauucagcaauccuca

SEQ ID NO: 399 - RNA, 24 nt, Homo sapiens
aaaacagaugccaguauucuacag

SEQ ID NO: 400 - RNA, 24 nt, Homo sapiens
aaacagaugccaguauucuacagg

SEQ ID NO: 401 - RNA, 24 nt, Homo sapiens
aacagaugccaguauucuacagga

SEQ ID NO: 402 - RNA, 24 nt, Homo sapiens
gaaucugcgguggcaggaggucug

SEQ ID NO: 403 - RNA, 24 nt, Homo sapiens
aggucugcaaacagcugucagaca

SEQ ID NO: 404 - RNA, 24 nt, Homo sapiens
ggucugcaaacagcugucagacag

SEQ ID NO: 405 - RNA, 24 nt, Homo sapiens
gucugcaaacagcugucagacaga

SEQ ID NO: 406 - RNA, 24 nt, Homo sapiens
ucugcaaacagcugucagacagaa

SEQ ID NO: 407 - RNA, 24 nt, Homo sapiens
uagggcgacagaucuaauaggaau

SEQ ID NO: 408 - RNA, 24 nt, Homo sapiens
agggcgacagaucuaauaggaaug

SEQ ID NO: 409 - RNA, 24 nt, Homo sapiens
uaaagaaagcuuaaaaagucugcu

SEQ ID NO: 410 - RNA, 24 nt, Homo sapiens
cuaaagaaagcuuaaaaagucugc

SEQ ID NO: 411 - RNA, 24 nt, Homo sapiens
aaauauucuucuaaagaaagcuua

SEQ ID NO: 412 - RNA, 24 nt, Homo sapiens
gaaauauucuucuaaagaaagcuu

SEQ ID NO: 413 - RNA, 24 nt, Homo sapiens
ugaaauauucuucuaaagaaagcu

SEQ ID NO: 414 - RNA, 24 nt, Homo sapiens
ucucucaugaaauauucuucuaaa

SEQ ID NO: 415 - RNA, 24 nt, Homo sapiens
auaaucucucaugaaauauucuuc

SEQ ID NO: 416 - RNA, 24 nt, Homo sapiens
gcguauauuuuuugguuauacuga

SEQ ID NO: 417 - RNA, 24 nt, Homo sapiens
ucaagaaaaauagauggauuaugu

SEQ ID NO: 418 - RNA, 24 nt, Homo sapiens
aucaagaaaaauagauggauuaug

SEQ ID NO: 419 - RNA, 24 nt, Homo sapiens
cagguaaaagcauauggaucaaga

SEQ ID NO: 420 - RNA, 24 nt, Homo sapiens
gcagguaaaagcauauggaucaag

SEQ ID NO: 421 - RNA, 24 nt, Homo sapiens
ugcagguaaaagcauauggaucaa

SEQ ID NO: 422 - RNA, 24 nt, Homo sapiens
caggcgauuugacagaucuguuga

SEQ ID NO: 423 - RNA, 24 nt, Homo sapiens
agaucugucaaaucgccugcaggu

SEQ ID NO: 424 - RNA, 24 nt, Homo sapiens
cagaucugucaaaucgccugcagg

SEQ ID NO: 425 - RNA, 24 nt, Homo sapiens
gccgccauuucucaacagaucugu

SEQ ID NO: 426 - RNA, 24 nt, Homo sapiens
aauggcggcguuuucauuaugaua

SEQ ID NO: 427 - RNA, 24 nt, Homo sapiens
auuaaauaucuuuauaucauaaug

SEQ ID NO: 428 - RNA, 24 nt, Homo sapiens
ugagaauugggaacaugcuaaaua

SEQ ID NO: 429 - RNA, 24 nt, Homo sapiens
gguaagucuuugauuuguuuuuuc

SEQ ID NO: 430 - RNA, 24 nt, Homo sapiens
aaauacaauuucgaaaaaacaaau

SEQ ID NO: 431 - RNA, 24 nt, Homo sapiens
aagauaaauacaauuucgaaaaaa

SEQ ID NO: 432 - RNA, 24 nt, Homo sapiens
gcugaagauaaauacaauuucgaa

SEQ ID NO: 433 - RNA, 24 nt, Homo sapiens
ugcugaagauaaauacaauuucga

SEQ ID NO: 434 - RNA, 24 nt, Homo sapiens
gugcugaagauaaauacaauuucg

SEQ ID NO: 435 - RNA, 24 nt, Homo sapiens
ugugcugaagauaaauacaauuuc

SEQ ID NO: 436 - RNA, 24 nt, Homo sapiens
gcacaucuggacucuuuaacuucu

SEQ ID NO: 437 - RNA, 24 nt, Homo sapiens
uaaagaguccagaugugcugaaga

SEQ ID NO: 438 - RNA, 24 nt, Homo sapiens
aagaucagguucugaagggugaug

SEQ ID NO: 439 - RNA, 24 nt, Homo sapiens
uucagaaccugaucuuuaagaagu

SEQ ID NO: 440 - RNA, 24 nt, Homo sapiens
aauauaaugaugacaacaacaguc

SEQ ID NO: 441 - RNA, 24 nt, Homo sapiens
uaauauaaugaugacaacaacagu

SEQ ID NO: 442 - RNA, 24 nt, Homo sapiens
uuuauuuuuccuuuuauucuaguu

SEQ ID NO: 443 - RNA, 24 nt, Homo sapiens
aaaggaaaaauaaauauauaguag

SEQ ID NO: 444 - RNA, 24 nt, Homo sapiens
uuucaacuagaauaaaaggaaaaa

SEQ ID NO: 445 - RNA, 24 nt, Homo sapiens
auucuuucaacuagaauaaaagga

SEQ ID NO: 446 - RNA, 24 nt, Homo sapiens
aauucuuucaacuagaauaaaagg

SEQ ID NO: 447 - RNA, 24 nt, Homo sapiens
gaauucuuucaacuagaauaaaag

SEQ ID NO: 448 - RNA, 24 nt, Homo sapiens
auucugaauucuuucaacuagaau

SEQ ID NO: 449 - RNA, 24 nt, Homo sapiens
gauucugaauucuuucaacuagaa

SEQ ID NO: 450 - RNA, 24 nt, Homo sapiens
cagaaccggaggcaacaguugaau

SEQ ID NO: 451 - RNA, 24 nt, Homo sapiens
ggaggcaacaguugaaugaaaugu

SEQ ID NO: 452 - RNA, 24 nt, Homo sapiens
uauacaguagaugcaauccaaaag

SEQ ID NO: 453 - RNA, 24 nt, Homo sapiens
gaugcaauccaaaagaaaaucaca

SEQ ID NO: 454 - RNA, 24 nt, Homo sapiens
aaucacagaaaccaagguuaguau

SEQ ID NO: 455 - RNA, 23 nt, Homo sapiens
agguuaguaucaaagauaccuuu

SEQ ID NO: 456 - RNA, 24 nt, Homo sapiens
gguuaguaucaaagauaccuuuuu

SEQ ID NO: 457 - RNA, 24 nt, Homo sapiens
aguaucaaagauaccuuuuuaaaa

SEQ ID NO: 458 - RNA, 24 nt, Homo sapiens
guaucaaagauaccuuuuuaaaau

SEQ ID NO: 459 - RNA, 24 nt, Homo sapiens
uguuugugucccaguuugcauuaa

SEQ ID NO: 460 - RNA, 24 nt, Homo sapiens
cugggacacaaacauggcaauuua

SEQ ID NO: 461 - RNA, 24 nt, Homo sapiens
acugggacacaaacauggcaauuu

SEQ ID NO: 462 - RNA, 24 nt, Homo sapiens
aacugggacacaaacauggcaauu

SEQ ID NO: 463 - RNA, 24 nt, Homo sapiens
uauuuguuaaugcaaacugggaca

SEQ ID NO: 464 - RNA, 24 nt, Homo sapiens
acaaauaguuugagaacuauguug

SEQ ID NO: 465 - RNA, 24 nt, Homo sapiens
caaauaguuugagaacuauguugg

SEQ ID NO: 466 - RNA, 24 nt, Homo sapiens
aaauaguuugagaacuauguugga

SEQ ID NO: 467 - RNA, 24 nt, Homo sapiens
auaguuugagaacuauguuggaaa

SEQ ID NO: 468 - RNA, 24 nt, Homo sapiens
uaguuugagaacuauguuggaaaa

SEQ ID NO: 469 - RNA, 24 nt, Homo sapiens
aguuugagaacuauguuggaaaaa

SEQ ID NO: 470 - RNA, 24 nt, Homo sapiens
uaguucucaaacuauuuguuaaug

SEQ ID NO: 471 - RNA, 24 nt, Homo sapiens
uauuuuuuuuuccaacauaguucu

SEQ ID NO: 472 - RNA, 24 nt, Homo sapiens
cuucuuucuccaggcuagaagaac

SEQ ID NO: 473 - RNA, 24 nt, Homo sapiens
cuucuagccuggagaaagaagaau

SEQ ID NO: 474 - RNA, 24 nt, Homo sapiens
ucuucuagccuggagaaagaagaa

SEQ ID NO: 475 - RNA, 24 nt, Homo sapiens
auucuuuuguucuucuagccugga

SEQ ID NO: 476 - RNA, 24 nt, Homo sapiens
caaaagaauaucuugucagaauuu

SEQ ID NO: 477 - RNA, 24 nt, Homo sapiens
cuggaaaagagcagcaacuaaaag

SEQ ID NO: 478 - RNA, 24 nt, Homo sapiens
caagucaagguaauuuuauuuucu

SEQ ID NO: 479 - RNA, 24 nt, Homo sapiens
caaaucccccagggccugcuugca

SEQ ID NO: 480 - RNA, 24 nt, Homo sapiens
aggcccugggggauuugagaaaau

SEQ ID NO: 481 - RNA, 24 nt, Homo sapiens
caggcccugggggauuugagaaaa

SEQ ID NO: 482 - RNA, 24 nt, Homo sapiens
caagcaggcccugggggauuugag

SEQ ID NO: 483 - RNA, 24 nt, Homo sapiens
gcaagcaggcccugggggauuuga

SEQ ID NO: 484 - RNA, 24 nt, Homo sapiens
gcagaaaaccaaugauugaauuaa

SEQ ID NO: 485 - RNA, 24 nt, Homo sapiens
ggcagaaaaccaaugauugaauua

SEQ ID NO: 486 - RNA, 24 nt, Homo sapiens
gggcagaaaaccaaugauugaauu

SEQ ID NO: 487 - RNA, 24 nt, Homo sapiens
ugggcagaaaaccaaugauugaau

SEQ ID NO: 488 - RNA, 24 nt, Homo sapiens
auuagguuauucauaguuccuugc

SEQ ID NO: 489 - RNA, 24 nt, Homo sapiens
aacuaugaauaaccuaaugggcag

SEQ ID NO: 490 - RNA, 24 nt, Homo sapiens
gaacuaugaauaaccuaaugggca

SEQ ID NO: 491 - RNA, 24 nt, Homo sapiens
uauuuccuguuaaauuguuuucua

SEQ ID NO: 492 - RNA, 24 nt, Homo sapiens
gguuuauagaaaacaauuuaacag

SEQ ID NO: 493 - RNA, 24 nt, Homo sapiens
auacaguaacaucuuuuuuauuuc

SEQ ID NO: 494 - RNA, 24 nt, Homo sapiens
uacaguaacaucuuuuuuauuucu

SEQ ID NO: 495 - RNA, 24 nt, Homo sapiens
auguuacuguauaaggguuuauag

SEQ ID NO: 496 - RNA, 24 nt, Homo sapiens
gauguuacuguauaaggguuuaua

SEQ ID NO: 497 - RNA, 24 nt, Homo sapiens
cagccaaaacacuuuuagaaauaa

SEQ ID NO: 498 - RNA, 24 nt, Homo sapiens
ccagccaaaacacuuuuagaaaua

SEQ ID NO: 499 - RNA, 24 nt, Homo sapiens
accagccaaaacacuuuuagaaau

SEQ ID NO: 500 - RNA, 24 nt, Homo sapiens
gaccagccaaaacacuuuuagaaa

SEQ ID NO: 501 - RNA, 24 nt, Homo sapiens
gugagaccagccaaaacacuuuua

SEQ ID NO: 502 - RNA, 24 nt, Homo sapiens
aauuguacuuuacuuuguauuaug

SEQ ID NO: 503 - RNA, 24 nt, Homo sapiens
auuguacuuuacuuuguauuaugu

SEQ ID NO: 504 - RNA, 24 nt, Homo sapiens
uaaaguacaauugugagaccagcc

SEQ ID NO: 505 - RNA, 24 nt, Homo sapiens
guaaaguacaauugugagaccagc

SEQ ID NO: 506 - RNA, 24 nt, Homo sapiens
guauuccuuuuacauaauacaaag

SEQ ID NO: 507 - RNA, 24 nt, Homo sapiens
guuguguauuccuuuuacauaaua

SEQ ID NO: 508 - RNA, 24 nt, Homo sapiens
auccugcauuguugccuguaagaa

SEQ ID NO: 509 - RNA, 24 nt, Homo sapiens
uuccaacuggggacgccucuguuc

SEQ ID NO: 510 - RNA, 24 nt, Homo sapiens
uuggaagaacucauuaccgcugcc

SEQ ID NO: 511 - RNA, 24 nt, Homo sapiens
ucauuaccgcugcccaaaauuuga

SEQ ID NO: 512 - RNA, 24 nt, Homo sapiens
cucuugauugcuggucuuguuuuu

SEQ ID NO: 513 - RNA, 24 nt, Homo sapiens
guuuuuuaacaagcaugggacaca

SEQ ID NO: 514 - RNA, 24 nt, Homo sapiens
cuuugugugucccaugcuuguuaa

SEQ ID NO: 515 - RNA, 24 nt, Homo sapiens
gcuuugugugucccaugcuuguua

SEQ ID NO: 516 - RNA, 24 nt, Homo sapiens
ugcuuugugugucccaugcuuguu

SEQ ID NO: 517 - RNA, 24 nt, Homo sapiens
uugcuuugugugucccaugcuugu

SEQ ID NO: 518 - RNA, 24 nt, Homo sapiens
agcaagaugcaugacaaguuucaa

SEQ ID NO: 519 - RNA, 24 nt, Homo sapiens
gcaagaugcaugacaaguuucaau

SEQ ID NO: 520 - RNA, 24 nt, Homo sapiens
caagaugcaugacaaguuucaaua

SEQ ID NO: 521 - RNA, 24 nt, Homo sapiens
gauauaugaacuuaaguuuuuauu

SEQ ID NO: 522 - RNA, 24 nt, Homo sapiens
auagaaauccaauaauauauucac

SEQ ID NO: 523 - RNA, 24 nt, Homo sapiens
auuaagauguucaugaauuaucuu

SEQ ID NO: 524 - RNA, 24 nt, Homo sapiens
uaaguaauguguaugcuuuucugu

SEQ ID NO: 525 - RNA, 24 nt, Homo sapiens
aucuucuaacuuccucuuuaacag

SEQ ID NO: 526 - RNA, 24 nt, Homo sapiens
gaucuucuaacuuccucuuuaaca

SEQ ID NO: 527 - RNA, 24 nt, Homo sapiens
aucugagcucugaguggaaggcgg

SEQ ID NO: 528 - RNA, 24 nt, Homo sapiens
accguuuacuucaagagcugaggg

SEQ ID NO: 529 - RNA, 24 nt, Homo sapiens
cugcuuugcccucagcucuugaag

SEQ ID NO: 530 - RNA, 24 nt, Homo sapiens
ucucuuuggcucuagcuauuuguu

SEQ ID NO: 531 - RNA, 24 nt, Homo sapiens
cucuuuggcucuagcuauuuguuc

SEQ ID NO: 532 - RNA, 24 nt, Homo sapiens
cacuuuugaacaaauagcuagagc

SEQ ID NO: 533 - RNA, 24 nt, Homo sapiens
ucacuucauaguugcacuuuugaa

SEQ ID NO: 534 - RNA, 24 nt, Homo sapiens
augaagugaugacugggugagaga

SEQ ID NO: 535 - RNA, 24 nt, Homo sapiens
ugaagugaugacugggugagagag

SEQ ID NO: 536 - RNA, 24 nt, Homo sapiens
aagagaaaaauauauauauauaua

SEQ ID NO: 537 - RNA, 24 nt, Homo sapiens
gaauuagcugucuauagaaagaga

SEQ ID NO: 538 - RNA, 24 nt, Homo sapiens
ugaauuagcugucuauagaaagag

SEQ ID NO: 539 - RNA, 24 nt, Homo sapiens
agcuaauucauuuuuuuacuguuu

SEQ ID NO: 540 - RNA, 24 nt, Homo sapiens
augaauuagcugucuauagaaaga

SEQ ID NO: 541 - RNA, 24 nt, Homo sapiens
gcuaauucauuuuuuuacuguuuu

SEQ ID NO: 542 - RNA, 24 nt, Homo sapiens
aaaaaaaugaauuagcugucuaua

SEQ ID NO: 543 - RNA, 24 nt, Homo sapiens
uuaaaauuuuuauauuacagaaua

SEQ ID NO: 544 - RNA, 24 nt, Homo sapiens
uaaaauuuuuauauuacagaauau

SEQ ID NO: 545 - RNA, 24 nt, Homo sapiens
auauaaaaauuuuaaaacaguaaa

SEQ ID NO: 546 - RNA, 24 nt, Homo sapiens
aauauaaaaauuuuaaaacaguaa

SEQ ID NO: 547 - RNA, 24 nt, Homo sapiens
uaauauaaaaauuuuaaaacagua

SEQ ID NO: 548 - RNA, 24 nt, Homo sapiens
guaauauaaaaauuuuaaaacagu

SEQ ID NO: 549 - RNA, 24 nt, Homo sapiens
uguaauauaaaaauuuuaaaacag

SEQ ID NO: 550 - RNA, 24 nt, Homo sapiens
uauauucuguaauauaaaaauuuu

SEQ ID NO: 551 - RNA, 24 nt, Homo sapiens
uuauauucuguaauauaaaaauuu

SEQ ID NO: 552 - RNA, 24 nt, Homo sapiens
cagaauauaaaagauagucuacaa

SEQ ID NO: 553 - RNA, 24 nt, Homo sapiens
cuaucuuuuauauucuguaauaua

SEQ ID NO: 554 - RNA, 24 nt, Homo sapiens
acuaucuuuuauauucuguaauau

SEQ ID NO: 555 - RNA, 24 nt, Homo sapiens
gacuaucuuuuauauucuguaaua

SEQ ID NO: 556 - RNA, 24 nt, Homo sapiens
cauagcaagaagacagcagcauug

SEQ ID NO: 557 - RNA, 24 nt, Homo sapiens
cauuuuguuaacuuuuucccauug

SEQ ID NO: 558 - RNA, 24 nt, Homo sapiens
cauauauuuuucuugauacuugca

SEQ ID NO: 559 - RNA, 24 nt, Homo sapiens
aaaucauuucugcaaguaucaaga

SEQ ID NO: 560 - RNA, 24 nt, Homo sapiens
caaaucauuucugcaaguaucaag

SEQ ID NO: 561 - RNA, 24 nt, Homo sapiens
acaaaucauuucugcaaguaucaa

SEQ ID NO: 562 - RNA, 24 nt, Homo sapiens
auaaauucuacaguucccugaaaa

SEQ ID NO: 563 - RNA, 24 nt, Homo sapiens
gaauuuauuucaguacccuccaug

SEQ ID NO: 564 - RNA, 24 nt, Homo sapiens
aauuuauuucaguacccuccaugg

SEQ ID NO: 565 - RNA, 24 nt, Homo sapiens
ugaaauaaauucuacaguucccug

SEQ ID NO: 566 - RNA, 24 nt, Homo sapiens
auuuauuucaguacccuccaugga

SEQ ID NO: 567 - RNA, 24 nt, Homo sapiens
cugaaauaaauucuacaguucccu

SEQ ID NO: 568 - RNA, 24 nt, Homo sapiens
uuuauuucaguacccuccauggaa

SEQ ID NO: 569 - RNA, 24 nt, Homo sapiens
uacccuccauggaaaaaagacagg

SEQ ID NO: 570 - RNA, 24 nt, Homo sapiens
acccuccauggaaaaaagacaggg

SEQ ID NO: 571 - RNA, 24 nt, Homo sapiens
cccuccauggaaaaaagacaggga

SEQ ID NO: 572 - RNA, 24 nt, Homo sapiens
uuuuuuccauggaggguacugaaa

SEQ ID NO: 573 - RNA, 24 nt, Homo sapiens
ugucuuuuuuccauggaggguacu

SEQ ID NO: 574 - RNA, 24 nt, Homo sapiens
ccuugagcaagaaccaugcaaacu

SEQ ID NO: 575 - RNA, 24 nt, Homo sapiens
ugcucaaggaaugcauuuucuuau

SEQ ID NO: 576 - RNA, 24 nt, Homo sapiens
gcucaaggaaugcauuuucuuaug

SEQ ID NO: 577 - RNA, 24 nt, Homo sapiens
ugcauuccuugagcaagaaccaug

SEQ ID NO: 578 - RNA, 24 nt, Homo sapiens
gaaaauuuauuuccacauguaggu

SEQ ID NO: 579 - RNA, 24 nt, Homo sapiens
aaaauuuauuuccacauguagguc

SEQ ID NO: 580 - RNA, 24 nt, Homo sapiens
aaauuuauuuccacauguagguca

SEQ ID NO: 581 - RNA, 24 nt, Homo sapiens
cauguggaaauaaauuuucauaag

SEQ ID NO: 582 - RNA, 24 nt, Homo sapiens
acauguggaaauaaauuuucauaa

SEQ ID NO: 583 - RNA, 24 nt, Homo sapiens
ccacauguaggucaaaaauguaau

SEQ ID NO: 584 - RNA, 24 nt, Homo sapiens
cacauguaggucaaaaauguaaug

SEQ ID NO: 585 - RNA, 24 nt, Homo sapiens
acauguaggucaaaaauguaauga

SEQ ID NO: 586 - RNA, 24 nt, Homo sapiens
acauuuuugaccuacauguggaaa

SEQ ID NO: 587 - RNA, 24 nt, Homo sapiens
cauuacauuuuugaccuacaugug

SEQ ID NO: 588 - RNA, 24 nt, Homo sapiens
aaaaauaucauggcuggauugcaa

SEQ ID NO: 589 - RNA, 24 nt, Homo sapiens
gcuggauugcaacaaaccaacagu

SEQ ID NO: 590 - RNA, 24 nt, Homo sapiens
cuggauugcaacaaaccaacagug

SEQ ID NO: 591 - RNA, 24 nt, Homo sapiens
ccuaugacuauggaugagagcauu

SEQ ID NO: 592 - RNA, 24 nt, Homo sapiens
uagguaagaagauuacugagacau

SEQ ID NO: 593 - RNA, 24 nt, Homo sapiens
auuacugagacauuaaauaacuug

SEQ ID NO: 594 - RNA, 24 nt, Homo sapiens
uuacugagacauuaaauaacuugu

SEQ ID NO: 595 - RNA, 24 nt, Homo sapiens
ggggaaaaauaugucaucagaguc

SEQ ID NO: 596 - RNA, 24 nt, Homo sapiens
caugaucuggaaccauacugggga

SEQ ID NO: 597 - RNA, 24 nt, Homo sapiens
acaugaucuggaaccauacugggg

SEQ ID NO: 598 - RNA, 24 nt, Homo sapiens
gacaugaucuggaaccauacuggg

SEQ ID NO: 599 - RNA, 24 nt, Homo sapiens
uacacacauacacaaagacaaaua

SEQ ID NO: 600 - RNA, 24 nt, Homo sapiens
uacacauacacacauacacaaaga

SEQ ID NO: 601 - RNA, 24 nt, Homo sapiens
aacacauacacauacacacauaca

SEQ ID NO: 602 - RNA, 24 nt, Homo sapiens
auuccagucaaauaggucuggccu

SEQ ID NO: 603 - RNA, 24 nt, Homo sapiens
uauuccagucaaauaggucuggcc

SEQ ID NO: 604 - RNA, 24 nt, Homo sapiens
gcuggcaaaccacacuauuccagu

SEQ ID NO: 605 - RNA, 24 nt, Homo sapiens
agucguuguguggcugacugcugg

SEQ ID NO: 606 - RNA, 24 nt, Homo sapiens
cgccagauaucaauuaggcauaga

SEQ ID NO: 607 - RNA, 24 nt, Homo sapiens
aaacuacucgauccugaagguugg

SEQ ID NO: 608 - RNA, 24 nt, Homo sapiens
cauacuaaaagcagugguagucca

SEQ ID NO: 609 - RNA, 24 nt, Homo sapiens
gaaaacauuaaacucuaccauacu

SEQ ID NO: 610 - RNA, 24 nt, Homo sapiens
ugaaaacauuaaacucuaccauac

SEQ ID NO: 611 - RNA, 24 nt, Homo sapiens
uuguucauuauccuuuuagagucu

SEQ ID NO: 612 - RNA, 24 nt, Homo sapiens
aaaggauaaugaacaaaucaaagu

SEQ ID NO: 613 - RNA, 24 nt, Homo sapiens
uauccuuuuagagucucaaauaua

SEQ ID NO: 614 - RNA, 24 nt, Homo sapiens
acucuaaaaggauaaugaacaaau

SEQ ID NO: 615 - RNA, 24 nt, Homo sapiens
uuuuagagucucaaauauagaaac

SEQ ID NO: 616 - RNA, 24 nt, Homo sapiens
uuuagagucucaaauauagaaacc

SEQ ID NO: 617 - RNA, 24 nt, Homo sapiens
uuagagucucaaauauagaaacca

SEQ ID NO: 618 - RNA, 24 nt, Homo sapiens
uugagacucuaaaaggauaaugaa

SEQ ID NO: 619 - RNA, 24 nt, Homo sapiens
uuugguuucuauauuugagacucu

SEQ ID NO: 620 - RNA, 24 nt, Homo sapiens
uuuugguuucuauauuugagacuc

SEQ ID NO: 621 - RNA, 24 nt, Homo sapiens
agcauugaagccauccaggaagug

SEQ ID NO: 622 - RNA, 24 nt, Homo sapiens
gcuucaaugcucacuuguugaggc

SEQ ID NO: 623 - RNA, 24 nt, Homo sapiens
ggcuucaaugcucacuuguugagg

SEQ ID NO: 624 - RNA, 24 nt, Homo sapiens
aguggaaauguugccaaggccacc

SEQ ID NO: 625 - RNA, 24 nt, Homo sapiens
guugccaaggccaccuaaagugac

SEQ ID NO: 626 - RNA, 24 nt, Homo sapiens
gaagaacauuuucaguuacaucau

SEQ ID NO: 627 - RNA, 24 nt, Homo sapiens
aucaaaugcacuauucucaacagg

SEQ ID NO: 628 - RNA, 24 nt, Homo sapiens
auagugcauuugaugauguaacug

SEQ ID NO: 629 - RNA, 24 nt, Homo sapiens
aauagugcauuugaugauguaacu

SEQ ID NO: 630 - RNA, 24 nt, Homo sapiens
acuauucucaacagguaaagugug

SEQ ID NO: 631 - RNA, 24 nt, Homo sapiens
uaccuaaaaaugcauauaaaacag

SEQ ID NO: 632 - RNA, 24 nt, Homo sapiens
auaccuaaaaaugcauauaaaaca

SEQ ID NO: 633 - RNA, 24 nt, Homo sapiens
cacguaauaccuaaaaaugcauau

SEQ ID NO: 634 - RNA, 24 nt, Homo sapiens
gcacguaauaccuaaaaaugcaua

SEQ ID NO: 635 - RNA, 24 nt, Homo sapiens
auauauaugugcacguaauaccua

SEQ ID NO: 636 - RNA, 24 nt, Homo sapiens
uauauauaugugcacguaauaccu

SEQ ID NO: 637 - RNA, 24 nt, Homo sapiens
auauauauaugugcacguaauacc

SEQ ID NO: 638 - RNA, 24 nt, Homo sapiens
cugcacaauauuauaguuguugcu

SEQ ID NO: 639 - RNA, 24 nt, Homo sapiens
auaaaaagagaaagauggaggaac

SEQ ID NO: 640 - RNA, 24 nt, Homo sapiens
caccuagugaacuccauaaaaaga

SEQ ID NO: 641 - RNA, 24 nt, Homo sapiens
auggugcaccuagugaacuccaua

SEQ ID NO: 642 - RNA, 24 nt, Homo sapiens
aauggugcaccuagugaacuccau

SEQ ID NO: 643 - RNA, 24 nt, Homo sapiens
gaauggugcaccuagugaacucca

SEQ ID NO: 644 - RNA, 24 nt, Homo sapiens
gaccaaauguucagaugcaauuau

SEQ ID NO: 645 - RNA, 24 nt, Homo sapiens
ucgcucacucacccugcaaaggac

SEQ ID NO: 646 - RNA, 24 nt, Homo sapiens
agugagcgagaggcugcuuuggaa

SEQ ID NO: 647 - RNA, 24 nt, Homo sapiens
gcagccucucgcucacucacccug

SEQ ID NO: 648 - RNA, 24 nt, Homo sapiens
uugcaguaaucuaugaguuucuuc

SEQ ID NO: 649 - RNA, 24 nt, Homo sapiens
cugcaacaguucccccuggaccug

SEQ ID NO: 650 - RNA, 24 nt, Homo sapiens
ugcaacaguucccccuggaccugg

SEQ ID NO: 651 - RNA, 24 nt, Homo sapiens
uuucuugccuggcuuacagaagcu

SEQ ID NO: 652 - RNA, 24 nt, Homo sapiens
uuucagcuucuguaagccaggcaa

SEQ ID NO: 653 - RNA, 24 nt, Homo sapiens
guccuacaggaugcuacccguaag

SEQ ID NO: 654 - RNA, 24 nt, Homo sapiens
ggcuccuagaagacuccaagggag

SEQ ID NO: 655 - RNA, 24 nt, Homo sapiens
gcuccuagaagacuccaagggagu

SEQ ID NO: 656 - RNA, 24 nt, Homo sapiens
cuccaagggaguaaaagagcugau

SEQ ID NO: 657 - RNA, 24 nt, Homo sapiens
uggauccacaagagugcuaaagcg

SEQ ID NO: 658 - RNA, 24 nt, Homo sapiens
guucaauuggauccacaagagugc

SEQ ID NO: 659 - RNA, 24 nt, Homo sapiens
uacuuguaacugacaagccaggga

SEQ ID NO: 660 - RNA, 24 nt, Homo sapiens
acuuguaacugacaagccagggac

SEQ ID NO: 661 - RNA, 24 nt, Homo sapiens
guaacugacaagccagggacaaaa

SEQ ID NO: 662 - RNA, 24 nt, Homo sapiens
uaacugacaagccagggacaaaac

SEQ ID NO: 663 - RNA, 24 nt, Homo sapiens
ucccuggcuugucaguuacaagua

SEQ ID NO: 664 - RNA, 24 nt, Homo sapiens
cagaguaacagucugaguaggagc

SEQ ID NO: 665 - RNA, 24 nt, Homo sapiens
uacuuuguuuagcaauacauggua

SEQ ID NO: 666 - RNA, 24 nt, Homo sapiens
uggcucaaauuguuacucuucaau

SEQ ID NO: 667 - RNA, 24 nt, Mus musculus
cuuucaaagaacuuugcagagccu

SEQ ID NO: 668 - RNA, 24 nt, Mus musculus
guugaagccauuuuguugcucuuu

SEQ ID NO: 669 - RNA, 24 nt, Mus musculus
guugaagccauuuuauugcucuuu

SEQ ID NO: 670 - RNA, 24 nt, Mus musculus
uuuugaggcucugcaaaguucuuu

SEQ ID NO: 671 - RNA, 24 nt, Mus musculus
aguuauuaaugcauagauauucag

SEQ ID NO: 672 - RNA, 24 nt, Mus musculus
uauaauaugcccuguaauauaaua

SEQ ID NO: 673 - RNA, 24 nt, Mus musculus
uaaaggccaaaccucggcuuaccu

SEQ ID NO: 674 - RNA, 24 nt, Mus musculus
ucaauaucuuugaaggacucuggg

SEQ ID NO: 675 - DNA, 19 bp, Mus musculus
agagtaacagtctgactgg

SEQ ID NO: 676 - DNA, 19 bp, Mus musculus
gaaatgatcatcaaacaga

SEQ ID NO: 677 - DNA, 20 bp, Mus musculus
cactagagtaacagtctgac

SEQ ID NO: 678 - RNA, 19 nt, Mus musculus
ccagucagacuguuacucu

SEQ ID NO: 679 - RNA, 19 nt, Mus musculus
ucuguuugaugaucauuuc

SEQ ID NO: 680 - RNA, 20 nt, Mus musculus
gucagacuguuacucuagug

SEQ ID NO: 681 - RNA, 19 nt, Mus musculus
agaguaacagucugacugg

SEQ ID NO: 682 - RNA, 19 nt, Mus musculus
gaaaugaucaucaaacaga

SEQ ID NO: 683 - RNA, 20 nt, Mus musculus
cacuagaguaacagucugac

SEQ ID NO: 684 - DNA, 19 bp, Homo sapiens
agagtaacagtctgagtag

SEQ ID NO: 685 - DNA, 19 bp, Homo sapiens
gagatgatcatcaagcaga

SEQ ID NO: 686 - DNA, 20 bp, Homo sapiens
caccagagtaacagtctgag

SEQ ID NO: 687 - RNA, 19 nt, Homo sapiens
cuacucagacuguuacucu

SEQ ID NO: 688 - RNA, 19 nt, Homo sapiens
ucugcuugaugaucaucuc

SEQ ID NO: 689 - RNA, 20 nt, Homo sapiens
cucagacuguuacucuggug

SEQ ID NO: 690 - RNA, 19 nt, Homo sapiens
agaguaacagucugaguag

SEQ ID NO: 691 - RNA, 19 nt, Homo sapiens
gagaugaucaucaagcaga

SEQ ID NO: 692 - RNA, 20 nt, Homo sapiens
caccagaguaacagucugag

SEQ ID NO: 693 - DNA, 20 bp, Homo sapiens
tagtggtcagtccaggagct

SEQ ID NO: 694 - DNA, 20 bp, Homo sapiens
gctccaatagtggtcagtcc

SEQ ID NO: 695 - DNA, 20 bp, Homo sapiens
gctcctggactgaccactat

SEQ ID NO: 696 - DNA, 20 bp, Homo sapiens
atacttacaggctccaatag

SEQ ID NO: 697 - DNA, 20 bp, Homo sapiens
atgggatccagtatacttac

SEQ ID NO: 698 - DNA, 20 bp, Homo sapiens
attggagcctgtaagtatac

SEQ ID NO: 699 - DNA, 20 bp, Homo sapiens
cagagtaacagtctgagtag

SEQ ID NO: 700 - DNA, 20 bp, Homo sapiens
caccagagtaacagtctgag

SEQ ID NO: 701 - DNA, 20 bp, Homo sapiens
tattttgggtttttgcaaaa

SEQ ID NO: 702 - DNA, 20 bp, Homo sapiens
agtaggagctaaaatatttt

SEQ ID NO: 703 - DNA, 20 bp, Homo sapiens
gagtaggagctaaaatattt

SEQ ID NO: 704 - DNA, 20 bp, Homo sapiens
accagagtaacagtctgagt

SEQ ID NO: 705 - DNA, 20 bp, Homo sapiens
tcctactcagactgttactc

SEQ ID NO: 706 - DNA, 20 bp, Homo sapiens
tactctggtgacacaacctg

SEQ ID NO: 707 - DNA, 20 bp, Homo sapiens
gcagtttccttagtaaccac

SEQ ID NO: 708 - DNA, 20 bp, Homo sapiens
gacacaacctgtggttacta

SEQ ID NO: 709 - DNA, 20 bp, Homo sapiens
tgtcaccagagtaacagtct

SEQ ID NO: 710 - DNA, 20 bp, Homo sapiens
aggttgtgtcaccagagtaa

SEQ ID NO: 711 - DNA, 20 bp, Homo sapiens
aaccacaggttgtgtcacca

SEQ ID NO: 712 - DNA, 20 bp, Homo sapiens
gtaaccacaggttgtgtcac

SEQ ID NO: 713 - DNA, 20 bp, Homo sapiens
atttatttttccttttattc

SEQ ID NO: 714 - DNA, 20 bp, Homo sapiens
tttccttttattctagttga

SEQ ID NO: 715 - DNA, 20 bp, Homo sapiens
tgattctgaattctttcaac

SEQ ID NO: 716 - DNA, 20 bp, Homo sapiens
aattctttcaactagaataa

SEQ ID NO: 717 - DNA, 20 bp, Homo sapiens
ttattctagttgaaagaatt

SEQ ID NO: 718 - DNA, 20 bp, Homo sapiens
tagttgaaagaattcagaat

SEQ ID NO: 719 - DNA, 20 bp, Homo sapiens
aattcagaatcagtgggatg

SEQ ID NO: 720 - DNA, 20 bp, Homo sapiens
attctttcaactagaataaa

SEQ ID NO: 721 - DNA, 20 bp, Homo sapiens
ttgaaagaattcagaatcag

SEQ ID NO: 722 - DNA, 20 bp, Homo sapiens
tgaaagaattcagaatcagt

SEQ ID NO: 723 - DNA, 20 bp, Homo sapiens
actgttgcctccggttctga

SEQ ID NO: 724 - DNA, 20 bp, Homo sapiens
cagatctgtcaaatcgcctg

SEQ ID NO: 725 - DNA, 20 bp, Homo sapiens
aaaacgccgccatttctcaa

SEQ ID NO: 726 - DNA, 20 bp, Homo sapiens
agatctgtcaaatcgcctgc

SEQ ID NO: 727 - DNA, 20 bp, Homo sapiens
tatggatcaagaaaaataga

SEQ ID NO: 728 - DNA, 20 bp, Homo sapiens
cgcctgcaggtaaaagcata

SEQ ID NO: 729 - DNA, 20 bp, Homo sapiens
atccatatgcttttacctgc

SEQ ID NO: 730 - DNA, 20 bp, Homo sapiens
ttgacagatctgttgagaaa

SEQ ID NO: 731 - DNA, 20 bp, Homo sapiens
acagatctgttgagaaatgg

SEQ ID NO: 732 - DNA, 20 bp, Homo sapiens
ggcgatttgacagatctgtt

SEQ ID NO: 733 - DNA, 20 bp, Homo sapiens
ggcgttttcattatgatata

SEQ ID NO: 734 - DNA, 20 bp, Homo sapiens
atgatataaagatatttaat

SEQ ID NO: 735 - DNA, 20 bp, Homo sapiens
gatatttaatcagtggctaa

SEQ ID NO: 736 - DNA, 20 bp, Homo sapiens
atttaatcagtggctaacag

SEQ ID NO: 737 - DNA, 20 bp, Homo sapiens
agaaactgttcagcttctgt

SEQ ID NO: 738 - DNA, 20 bp, Homo sapiens
gggaacatgctaaatacaaa

SEQ ID NO: 739 - DNA, 20 bp, Homo sapiens
taaatacaaatggtatctta

SEQ ID NO: 740 - DNA, 20 bp, Homo sapiens
gttttaaaatttttatatta

SEQ ID NO: 741 - DNA, 20 bp, Homo sapiens
ttttatattacagaatataa

SEQ ID NO: 742 - DNA, 20 bp, Homo sapiens
atattacagaatataaaaga

SEQ ID NO: 743 - DNA, 20 bp, Homo sapiens
gttcctgtaagataccaaaa

SEQ ID NO: 744 - DNA, 20 bp, Homo sapiens
ttgcctttttggtatcttac

SEQ ID NO: 745 - DNA, 20 bp, Homo sapiens
tggtatcttacaggaactcc

SEQ ID NO: 746 - DNA, 20 bp, Homo sapiens
atcttacaggaactccagga

SEQ ID NO: 747 - DNA, 20 bp, Homo sapiens
gccgctgcccaatgccatcc

SEQ ID NO: 748 - DNA, 20 bp, Homo sapiens
caggaactccaggatggcat

SEQ ID NO: 749 - DNA, 20 bp, Homo sapiens
aggaactccaggatggcatt

SEQ ID NO: 750 - DNA, 20 bp, Homo sapiens
tccaggatggcattgggcag

SEQ ID NO: 751 - DNA, 20 bp, Homo sapiens
gtcagaacattgaatgcaac

SEQ ID NO: 752 - DNA, 20 bp, Homo sapiens
agttcctgtaagataccaaa

SEQ ID NO: 753 - DNA, 20 bp, Homo sapiens
tgccatcctggagttcctgt

SEQ ID NO: 754 - DNA, 20 bp, Homo sapiens
ttggtatcttacaggaactc

SEQ ID NO: 755 - DNA, 20 bp, Homo sapiens
cgctgcccaatgccatcctg

SEQ ID NO: 756 - DNA, 20 bp, Homo sapiens
aactccaggatggcattggg

SEQ ID NO: 757 - DNA, 20 bp, Homo sapiens
gggcagcggcaaactgttgt

SEQ ID NO: 758 - DNA, 20 bp, Homo sapiens
attcttttgttcttctagcc

SEQ ID NO: 759 - DNA, 20 bp, Homo sapiens
tgctcttttccaggttcaag

SEQ ID NO: 760 - DNA, 20 bp, Homo sapiens
gctagtatcccacttgaacc

SEQ ID NO: 761 - DNA, 20 bp, Homo sapiens
tttagttgctgctcttttcc

SEQ ID NO: 762 - DNA, 20 bp, Homo sapiens
agaaaagcttgagcaagtca

SEQ ID NO: 763 - DNA, 20 bp, Homo sapiens
agatctgtcaaatcgcctgc

SEQ ID NO: 764 - DNA, 20 bp, Homo sapiens
aatcctgcattgttgcctgt

SEQ ID NO: 765 - DNA, 20 bp, Homo sapiens
cgctgaagaaccctgatact

SEQ ID NO: 766 - DNA, 20 bp, Homo sapiens
gaacaaatatcccttagtat

SEQ ID NO: 767 - DNA, 20 bp, Homo sapiens
ctgtaagaacaaatatccct

SEQ ID NO: 768 - DNA, 20 bp, Homo sapiens
ctaagggatatttgttctta

SEQ ID NO: 769 - DNA, 20 bp, Homo sapiens
tgttcttacaggcaacaatg

SEQ ID NO: 770 - DNA, 20 bp, Homo sapiens
caacaatgcaggatttggaa

SEQ ID NO: 771 - DNA, 20 bp, Homo sapiens
acaatgcaggatttggaaca

SEQ ID NO: 772 - DNA, 20 bp, Homo sapiens
atttggaacagaggcgtccc

SEQ ID NO: 773 - DNA, 20 bp, Homo sapiens
acagaggcgtccccagttgg

SEQ ID NO: 774 - DNA, 20 bp, Homo sapiens
tatttttttattttgcattt

SEQ ID NO: 775 - DNA, 20 bp, Homo sapiens
ttattttgcattttagatga

SEQ ID NO: 776 - DNA, 20 bp, Homo sapiens
attttgcattttagatgaaa

SEQ ID NO: 777 - DNA, 20 bp, Homo sapiens
ttgcattttagatgaaagag

SEQ ID NO: 778 - DNA, 20 bp, Homo sapiens
atgaaagagaagatgttcaa

SEQ ID NO: 779 - RNA, 20 nt, Homo sapiens
cuacucagacuguuacucug

SEQ ID NO: 780 - RNA, 20 nt, Homo sapiens
cucagacuguuacucuggug

SEQ ID NO: 781 - RNA, 20 nt, Homo sapiens
uuuugcaaaaacccaaaaua

SEQ ID NO: 782 - RNA, 20 nt, Homo sapiens
aaaauauuuuagcuccuacu

SEQ ID NO: 783 - RNA, 20 nt, Homo sapiens
aaauauuuuagcuccuacuc

SEQ ID NO: 784 - RNA, 20 nt, Homo sapiens
acucagacuguuacucuggu

SEQ ID NO: 785 - RNA, 20 nt, Homo sapiens
gaguaacagucugaguagga

SEQ ID NO: 786 - RNA, 20 nt, Homo sapiens
cagguugugucaccagagua

SEQ ID NO: 787 - RNA, 20 nt, Homo sapiens
gugguuacuaaggaaacugc

SEQ ID NO: 788 - RNA, 20 nt, Homo sapiens
uaguaaccacagguuguguc

SEQ ID NO: 789 - RNA, 20 nt, Homo sapiens
agacuguuacucuggugaca

SEQ ID NO: 790 - RNA, 20 nt, Homo sapiens
uuacucuggugacacaaccu

SEQ ID NO: 791 - RNA, 20 nt, Homo sapiens
uggugacacaaccugugguu

SEQ ID NO: 792 - RNA, 20 nt, Homo sapiens
gugacacaaccugugguuac

SEQ ID NO: 793 - RNA, 20 nt, Homo sapiens
gaauaaaaggaaaaauaaau

SEQ ID NO: 794 - RNA, 20 nt, Homo sapiens
ucaacuagaauaaaaggaaa

SEQ ID NO: 795 - RNA, 20 nt, Homo sapiens
guugaaagaauucagaauca

SEQ ID NO: 796 - RNA, 20 nt, Homo sapiens
uuauucuaguugaaagaauu

SEQ ID NO: 797 - RNA, 20 nt, Homo sapiens
aauucuuucaacuagaauaa

SEQ ID NO: 798 - RNA, 20 nt, Homo sapiens
auucugaauucuuucaacua

SEQ ID NO: 799 - RNA, 20 nt, Homo sapiens
caucccacugauucugaauu

SEQ ID NO: 800 - RNA, 20 nt, Homo sapiens
uuuauucuaguugaaagaau

SEQ ID NO: 801 - RNA, 20 nt, Homo sapiens
cugauucugaauucuuucaa

SEQ ID NO: 802 - RNA, 20 nt, Homo sapiens
acugauucugaauucuuuca

SEQ ID NO: 803 - RNA, 20 nt, Homo sapiens
ucagaaccggaggcaacagu

SEQ ID NO: 804 - RNA, 20 nt, Homo sapiens
caggcgauuugacagaucug

SEQ ID NO: 805 - RNA, 20 nt, Homo sapiens
uugagaaauggcggcguuuu

SEQ ID NO: 806 - RNA, 20 nt, Homo sapiens
gcaggcgauuugacagaucu

SEQ ID NO: 807 - RNA, 20 nt, Homo sapiens
ucuauuuuucuugauccaua

SEQ ID NO: 808 - RNA, 20 nt, Homo sapiens
uaugcuuuuaccugcaggcg

SEQ ID NO: 809 - RNA, 20 nt, Homo sapiens
gcagguaaaagcauauggau

SEQ ID NO: 810 - RNA, 20 nt, Homo sapiens
uuucucaacagaucugucaa

SEQ ID NO: 811 - RNA, 20 nt, Homo sapiens
ccauuucucaacagaucugu

SEQ ID NO: 812 - RNA, 20 nt, Homo sapiens
aacagaucugucaaaucgcc

SEQ ID NO: 813 - RNA, 20 nt, Homo sapiens
uauaucauaaugaaaacgcc

SEQ ID NO: 814 - RNA, 20 nt, Homo sapiens
auuaaauaucuuuauaucau

SEQ ID NO: 815 - RNA, 20 nt, Homo sapiens
uuagccacugauuaaauauc

SEQ ID NO: 816 - RNA, 20 nt, Homo sapiens
cuguuagccacugauuaaau

SEQ ID NO: 817 - RNA, 20 nt, Homo sapiens
acagaagcugaacaguuucu

SEQ ID NO: 818 - RNA, 20 nt, Homo sapiens
uaauauaaaaauuuuaaaac

SEQ ID NO: 819 - RNA, 20 nt, Homo sapiens
uuauauucuguaauauaaaa

SEQ ID NO: 820 - RNA, 20 nt, Homo sapiens
ucuuuuauauucuguaauau

SEQ ID NO: 821 - RNA, 20 nt, Homo sapiens
uuuugguaucuuacaggaac

SEQ ID NO: 822 - RNA, 20 nt, Homo sapiens
guaagauaccaaaaaggcaa

SEQ ID NO: 823 - RNA, 20 nt, Homo sapiens
ggaguuccuguaagauacca

SEQ ID NO: 824 - RNA, 20 nt, Homo sapiens
uccuggaguuccuguaagau

SEQ ID NO: 825 - RNA, 20 nt, Homo sapiens
ggauggcauugggcagcggc

SEQ ID NO: 826 - RNA, 20 nt, Homo sapiens
augccauccuggaguuccug

SEQ ID NO: 827 - RNA, 20 nt, Homo sapiens
aaugccauccuggaguuccu

SEQ ID NO: 828 - RNA, 20 nt, Homo sapiens
cugcccaaugccauccugga

SEQ ID NO: 829 - RNA, 20 nt, Homo sapiens
guugcauucaauguucugac

SEQ ID NO: 830 - RNA, 20 nt, Homo sapiens
uuugguaucuuacaggaacu

SEQ ID NO: 831 - RNA, 20 nt, Homo sapiens
acaggaacuccaggauggca

SEQ ID NO: 832 - RNA, 20 nt, Homo sapiens
gaguuccuguaagauaccaa

SEQ ID NO: 833 - RNA, 20 nt, Homo sapiens
caggauggcauugggcagcg

SEQ ID NO: 834 - RNA, 20 nt, Homo sapiens
cccaaugccauccuggaguu

SEQ ID NO: 835 - RNA, 20 nt, Homo sapiens
acaacaguuugccgcugccc

SEQ ID NO: 836 - RNA, 20 nt, Homo sapiens
gcaggcgauuugacagaucu

SEQ ID NO: 837 - RNA, 20 nt, Homo sapiens
acaggcaacaaugcaggauu

SEQ ID NO: 838 - RNA, 20 nt, Homo sapiens
aguaucaggguucuucagcg

SEQ ID NO: 839 - RNA, 20 nt, Homo sapiens
auacuaagggauauuuguuc

SEQ ID NO: 840 - RNA, 20 nt, Homo sapiens
agggauauuuguucuuacag

SEQ ID NO: 841 - RNA, 20 nt, Homo sapiens
uaagaacaaauaucccuuag

SEQ ID NO: 842 - RNA, 20 nt, Homo sapiens
cauuguugccuguaagaaca

SEQ ID NO: 843 - RNA, 20 nt, Homo sapiens
uuccaaauccugcauuguug

SEQ ID NO: 844 - RNA, 20 nt, Homo sapiens
uguuccaaauccugcauugu

SEQ ID NO: 845 - RNA, 20 nt, Homo sapiens
gggacgccucuguuccaaau

SEQ ID NO: 846 - RNA, 20 nt, Homo sapiens
ccaacuggggacgccucugu

SEQ ID NO: 847 - RNA, 20 nt, Homo sapiens
acagaggcguccccaguugg

SEQ ID NO: 848 - RNA, 20 nt, Homo sapiens
ucaucuaaaaugcaaaauaa

SEQ ID NO: 849 - RNA, 20 nt, Homo sapiens
uuucaucuaaaaugcaaaau

SEQ ID NO: 850 - RNA, 20 nt, Homo sapiens
cucuuucaucuaaaaugcaa

SEQ ID NO: 851 - RNA, 20 nt, Homo sapiens
uugaacaucuucucuuucau

SEQ ID NO: 852 - RNA, 20 nt, Homo sapiens
cagaguaacagucugaguag

SEQ ID NO: 853 - RNA, 20 nt, Homo sapiens
caccagaguaacagucugag

SEQ ID NO: 854 - RNA, 20 nt, Homo sapiens
uauuuuggguuuuugcaaaa

SEQ ID NO: 855 - RNA, 20 nt, Homo sapiens
aguaggagcuaaaauauuuu

SEQ ID NO: 856 - RNA, 20 nt, Homo sapiens
gaguaggagcuaaaauauuu

SEQ ID NO: 857 - RNA, 20 nt, Homo sapiens
accagaguaacagucugagu

SEQ ID NO: 858 - RNA, 20 nt, Homo sapiens
uccuacucagacuguuacuc

SEQ ID NO: 859 - RNA, 20 nt, Homo sapiens
uacucuggugacacaaccug

SEQ ID NO: 860 - RNA, 20 nt, Homo sapiens
gcaguuuccuuaguaaccac

SEQ ID NO: 861 - RNA, 20 nt, Homo sapiens
gacacaaccugugguuacua

SEQ ID NO: 862 - RNA, 20 nt, Homo sapiens
ugucaccagaguaacagucu

SEQ ID NO: 863 - RNA, 20 nt, Homo sapiens
agguugugucaccagaguaa

SEQ ID NO: 864 - RNA, 20 nt, Homo sapiens
aaccacagguugugucacca

SEQ ID NO: 865 - RNA, 20 nt, Homo sapiens
guaaccacagguugugucac

SEQ ID NO: 866 - RNA, 20 nt, Homo sapiens
auuuauuuuuccuuuuauuc

SEQ ID NO: 867 - RNA, 20 nt, Homo sapiens
uuuccuuuuauucuaguuga

SEQ ID NO: 868 - RNA, 20 nt, Homo sapiens
ugauucugaauucuuucaac

SEQ ID NO: 869 - RNA, 20 nt, Homo sapiens
aauucuuucaacuagaauaa

SEQ ID NO: 870 - RNA, 20 nt, Homo sapiens
uuauucuaguugaaagaauu

SEQ ID NO: 871 - RNA, 20 nt, Homo sapiens
uaguugaaagaauucagaau

SEQ ID NO: 872 - RNA, 20 nt, Homo sapiens
aauucagaaucagugggaug

SEQ ID NO: 873 - RNA, 20 nt, Homo sapiens
auucuuucaacuagaauaaa

SEQ ID NO: 874 - RNA, 20 nt, Homo sapiens
uugaaagaauucagaaucag

SEQ ID NO: 875 - RNA, 20 nt, Homo sapiens
ugaaagaauucagaaucagu

SEQ ID NO: 876 - RNA, 20 nt, Homo sapiens
acuguugccuccgguucuga

SEQ ID NO: 877 - RNA, 20 nt, Homo sapiens
cagaucugucaaaucgccug

SEQ ID NO: 878 - RNA, 20 nt, Homo sapiens
aaaacgccgccauuucucaa

SEQ ID NO: 879 - RNA, 20 nt, Homo sapiens
agaucugucaaaucgccugc

SEQ ID NO: 880 - RNA, 20 nt, Homo sapiens
uauggaucaagaaaaauaga

SEQ ID NO: 881 - RNA, 20 nt, Homo sapiens
cgccugcagguaaaagcaua

SEQ ID NO: 882 - RNA, 20 nt, Homo sapiens
auccauaugcuuuuaccugc

SEQ ID NO: 883 - RNA, 20 nt, Homo sapiens
uugacagaucuguugagaaa

SEQ ID NO: 884 - RNA, 20 nt, Homo sapiens
acagaucuguugagaaaugg

SEQ ID NO: 885 - RNA, 20 nt, Homo sapiens
ggcgauuugacagaucuguu

SEQ ID NO: 886 - RNA, 20 nt, Homo sapiens
ggcguuuucauuaugauaua

SEQ ID NO: 887 - RNA, 20 nt, Homo sapiens
augauauaaagauauuuaau

SEQ ID NO: 888 - RNA, 20 nt, Homo sapiens
gauauuuaaucaguggcuaa

SEQ ID NO: 889 - RNA, 20 nt, Homo sapiens
auuuaaucaguggcuaacag

SEQ ID NO: 890 - RNA, 20 nt, Homo sapiens
agaaacuguucagcuucugu

SEQ ID NO: 891 - RNA, 20 nt, Homo sapiens
guuuuaaaauuuuuauauua

SEQ ID NO: 892 - RNA, 20 nt, Homo sapiens
uuuuauauuacagaauauaa

SEQ ID NO: 893 - RNA, 20 nt, Homo sapiens
auauuacagaauauaaaaga

SEQ ID NO: 894 - RNA, 20 nt, Homo sapiens
guuccuguaagauaccaaaa

SEQ ID NO: 895 - RNA, 20 nt, Homo sapiens
uugccuuuuugguaucuuac

SEQ ID NO: 896 - RNA, 20 nt, Homo sapiens
ugguaucuuacaggaacucc

SEQ ID NO: 897 - RNA, 20 nt, Homo sapiens
aucuuacaggaacuccagga

SEQ ID NO: 898 - RNA, 20 nt, Homo sapiens
gccgcugcccaaugccaucc

SEQ ID NO: 899 - RNA, 20 nt, Homo sapiens
caggaacuccaggauggcau

SEQ ID NO: 900 - RNA, 20 nt, Homo sapiens
aggaacuccaggauggcauu

SEQ ID NO: 901 - RNA, 20 nt, Homo sapiens
uccaggauggcauugggcag

SEQ ID NO: 902 - RNA, 20 nt, Homo sapiens
gucagaacauugaaugcaac

SEQ ID NO: 903 - RNA, 20 nt, Homo sapiens
aguuccuguaagauaccaaa

SEQ ID NO: 904 - RNA, 20 nt, Homo sapiens
ugccauccuggaguuccugu

SEQ ID NO: 905 - RNA, 20 nt, Homo sapiens
uugguaucuuacaggaacuc

SEQ ID NO: 906 - RNA, 20 nt, Homo sapiens
cgcugcccaaugccauccug

SEQ ID NO: 907 - RNA, 20 nt, Homo sapiens
aacuccaggauggcauuggg

SEQ ID NO: 908 - RNA, 20 nt, Homo sapiens
gggcagcggcaaacuguugu

SEQ ID NO: 909 - RNA, 20 nt, Homo sapiens
agaucugucaaaucgccugc

SEQ ID NO: 910 - RNA, 20 nt, Homo sapiens
aauccugcauuguugccugu

SEQ ID NO: 911 - RNA, 20 nt, Homo sapiens
cgcugaagaacccugauacu

SEQ ID NO: 912 - RNA, 20 nt, Homo sapiens
gaacaaauaucccuuaguau

SEQ ID NO: 913 - RNA, 20 nt, Homo sapiens
cuguaagaacaaauaucccu

SEQ ID NO: 914 - RNA, 20 nt, Homo sapiens
cuaagggauauuuguucuua

SEQ ID NO: 915 - RNA, 20 nt, Homo sapiens
uguucuuacaggcaacaaug

SEQ ID NO: 916 - RNA, 20 nt, Homo sapiens
caacaaugcaggauuuggaa

SEQ ID NO: 917 - RNA, 20 nt, Homo sapiens
acaaugcaggauuuggaaca

SEQ ID NO: 918 - RNA, 20 nt, Homo sapiens
auuuggaacagaggcguccc

SEQ ID NO: 919 - RNA, 20 nt, Homo sapiens
acagaggcguccccaguugg

SEQ ID NO: 920 - RNA, 20 nt, Homo sapiens
uauuuuuuuauuuugcauuu

SEQ ID NO: 921 - RNA, 20 nt, Homo sapiens
uuauuuugcauuuuagauga

SEQ ID NO: 922 - RNA, 20 nt, Homo sapiens
auuuugcauuuuagaugaaa

SEQ ID NO: 923 - RNA, 20 nt, Homo sapiens
uugcauuuuagaugaaagag

SEQ ID NO: 924 - RNA, 20 nt, Homo sapiens
augaaagagaagauguucaa

SEQ ID NO: 925 - DNA, 20 bp, Canis familiaris
caccagagtaacagtctgac

SEQ ID NO: 926 - RNA, 20 nt, Canis familiaris
gucagacuguuacucuggug

SEQ ID NO: 927 - RNA, 20 nt, Canis familiaris
caccagaguaacagucugac

SEQ ID NO: 928 - DNA, 20 bp, Homo sapiens
cgctgcccaatgccatcctg

SEQ ID NO: 929 - DNA, 20 bp, Homo sapiens
atcttacaggaactccagga

SEQ ID NO: 930 - DNA, 20 bp, Homo sapiens
aggaactccaggatggcatt

SEQ ID NO: 931 - DNA, 18 bp, Homo sapiens
cgctgcccaatgccatcc

SEQ ID NO: 932 - DNA, 20 bp, Homo sapiens
gttttaaaatttttatatta

SEQ ID NO: 933 - DNA, 20 bp, Homo sapiens
ttttatattacagaatataa

SEQ ID NO: 934 - DNA, 20 bp, Homo sapiens
tatgtgttacctacccttgt

SEQ ID NO: 935 - DNA, 20 bp, Homo sapiens
gtacaaggaccgacaagggt

SEQ ID NO: 936 - RNA, 20 nt, Homo sapiens
caggauggcauugggcagcg

SEQ ID NO: 937 - RNA, 20 nt, Homo sapiens
uccuggaguuccuguaagau

SEQ ID NO: 938 - RNA, 20 nt, Homo sapiens
aaugccauccuggaguuccu

SEQ ID NO: 939 - RNA, 18 nt, Homo sapiens
ggauggcauugggcagcg

SEQ ID NO: 940 - RNA, 20 nt, Homo sapiens
uaauauaaaaauuuuaaaac

SEQ ID NO: 941 - RNA, 20 nt, Homo sapiens
uuauauucuguaauauaaaa

SEQ ID NO: 942 - RNA, 20 nt, Homo sapiens
acaaggguagguaacacaua

SEQ ID NO: 943 - RNA, 20 nt, Homo sapiens
acccuugucgguccuuguac

SEQ ID NO: 944 - RNA, 20 nt, Homo sapiens
cgcugcccaaugccauccug

SEQ ID NO: 945 - RNA, 20 nt, Homo sapiens
aucuuacaggaacuccagga

SEQ ID NO: 946 - RNA, 20 nt, Homo sapiens
aggaacuccaggauggcauu

SEQ ID NO: 947 - RNA, 18 nt, Homo sapiens
cgcugcccaaugccaucc

SEQ ID NO: 948 - RNA, 20 nt, Homo sapiens
guuuuaaaauuuuuauauua

SEQ ID NO: 949 - RNA, 20 nt, Homo sapiens
uuuuauauuacagaauauaa

SEQ ID NO: 950 - RNA, 20 nt, Homo sapiens
uauguguuaccuacccuugu

SEQ ID NO: 951 - RNA, 20 nt, Homo sapiens
guacaaggaccgacaagggu

SEQ ID NO: 952 - RNA, 24 nt, Homo sapiens
ucuuuuucuucuuuuuuccuuuuu

SEQ ID NO: 953 - RNA, 24 nt, Homo sapiens
cuuuuucuucuuuuuuccuuuuug

SEQ ID NO: 954 - RNA, 24 nt, Homo sapiens
uuuuucuucuuuuuuccuuuuugc

SEQ ID NO: 955 - RNA, 24 nt, Homo sapiens
ucuucuuuuuuccuuuuugcaaaa

SEQ ID NO: 956 - RNA, 24 nt, Homo sapiens
cuucuuuuuuccuuuuugcaaaaa

SEQ ID NO: 957 - RNA, 24 nt, Homo sapiens
uucuuuuuuccuuuuugcaaaaac

SEQ ID NO: 958 - RNA, 24 nt, Homo sapiens
uuccuuuuugcaaaaacccaaaau

SEQ ID NO: 959 - RNA, 24 nt, Homo sapiens
uccuuuuugcaaaaacccaaaaua

SEQ ID NO: 960 - RNA, 24 nt, Homo sapiens
ccuuuuugcaaaaacccaaaauau

SEQ ID NO: 961 - RNA, 24 nt, Homo sapiens
cuuuuugcaaaaacccaaaauauu

SEQ ID NO: 962 - RNA, 24 nt, Homo sapiens
ugcaaaaacccaaaauauuuuagc

SEQ ID NO: 963 - RNA, 24 nt, Homo sapiens
gcaaaaacccaaaauauuuuagcu

SEQ ID NO: 964 - RNA, 24 nt, Homo sapiens
caaaaacccaaaauauuuuagcuc

SEQ ID NO: 965 - RNA, 24 nt, Homo sapiens
agcuccuacucagacuguuacucu

SEQ ID NO: 966 - RNA, 24 nt, Homo sapiens
gcuccuacucagacuguuacucug

SEQ ID NO: 967 - RNA, 24 nt, Homo sapiens
cuuaguaaccacagguugugucac

SEQ ID NO: 968 - RNA, 24 nt, Homo sapiens
gagauggcaguuuccuuaguaacc

SEQ ID NO: 969 - RNA, 24 nt, Homo sapiens
uaguuuggagauggcaguuuccuu

SEQ ID NO: 970 - RNA, 24 nt, Homo sapiens
uucucauaccuucugcuugaugau

SEQ ID NO: 971 - RNA, 24 nt, Homo sapiens
ucauuuuuucucauaccuucugcu

SEQ ID NO: 972 - RNA, 24 nt, Homo sapiens
aucauuuuuucucauaccuucugc

SEQ ID NO: 973 - RNA, 24 nt, Homo sapiens
aagaaaaacuucugccaacuuuua

SEQ ID NO: 974 - RNA, 24 nt, Homo sapiens
aaagaaaaacuucugccaacuuuu

SEQ ID NO: 975 - RNA, 24 nt, Homo sapiens
ucuuuaaaaugaagauuuuccacc

SEQ ID NO: 976 - RNA, 24 nt, Homo sapiens
cuuuaaaaugaagauuuuccacca

SEQ ID NO: 977 - RNA, 24 nt, Homo sapiens
uuuaaaaugaagauuuuccaccaa

SEQ ID NO: 978 - RNA, 24 nt, Homo sapiens
aaaugaagauuuuccaccaaucac

SEQ ID NO: 979 - RNA, 24 nt, Homo sapiens
ccaccaaucacuuuacucuccuag

SEQ ID NO: 980 - RNA, 24 nt, Homo sapiens
caccaaucacuuuacucuccuaga

SEQ ID NO: 981 - RNA, 24 nt, Homo sapiens
cucuccuagaccauuucccaccag

SEQ ID NO: 982 - RNA, 24 nt, Homo sapiens
agaaaagauuaaacagugugcuac

SEQ ID NO: 983 - RNA, 24 nt, Homo sapiens
uuugagaaaagauuaaacagugug

SEQ ID NO: 984 - RNA, 24 nt, Homo sapiens
auuugagaaaagauuaaacagugu

SEQ ID NO: 985 - RNA, 24 nt, Homo sapiens
uauuugagaaaagauuaaacagug

SEQ ID NO: 986 - RNA, 24 nt, Homo sapiens
aucuuuucucaaauaaaaagacau

SEQ ID NO: 987 - RNA, 24 nt, Homo sapiens
cucaaauaaaaagacauggggcuu

SEQ ID NO: 988 - RNA, 24 nt, Homo sapiens
ucaaauaaaaagacauggggcuuc

SEQ ID NO: 989 - RNA, 24 nt, Homo sapiens
uguuuugccuuuuugguaucuuac

SEQ ID NO: 990 - RNA, 24 nt, Homo sapiens
guuuugccuuuuugguaucuuaca

SEQ ID NO: 991 - RNA, 24 nt, Homo sapiens
uuuugccuuuuugguaucuuacag

SEQ ID NO: 992 - RNA, 24 nt, Homo sapiens
gccuuuuugguaucuuacaggaac

SEQ ID NO: 993 - RNA, 24 nt, Homo sapiens
ccuuuuugguaucuuacaggaacu

SEQ ID NO: 994 - RNA, 24 nt, Homo sapiens
ugguaucuuacaggaacuccagga

SEQ ID NO: 995 - RNA, 24 nt, Homo sapiens
gguaucuuacaggaacuccaggau

SEQ ID NO: 996 - RNA, 24 nt, Homo sapiens
aggauugcugaauuauuucuuccc

SEQ ID NO: 997 - RNA, 24 nt, Homo sapiens
gaggauugcugaauuauuucuucc

SEQ ID NO: 998 - RNA, 24 nt, Homo sapiens
ugaggauugcugaauuauuucuuc

SEQ ID NO: 999 - RNA, 24 nt, Homo sapiens
cuguagaauacuggcaucuguuuu

SEQ ID NO: 1000 - RNA, 24 nt, Homo sapiens
ccuguagaauacuggcaucuguuu

SEQ ID NO: 1001 - RNA, 24 nt, Homo sapiens
uccuguagaauacuggcaucuguu

SEQ ID NO: 1002 - RNA, 24 nt, Homo sapiens
cagaccuccugccaccgcagauuc

SEQ ID NO: 1003 - RNA, 24 nt, Homo sapiens
ugucugacagcuguuugcagaccu

SEQ ID NO: 1004 - RNA, 24 nt, Homo sapiens
cugucugacagcuguuugcagacc

SEQ ID NO: 1005 - RNA, 24 nt, Homo sapiens
ucugucugacagcuguuugcagac

SEQ ID NO: 1006 - RNA, 24 nt, Homo sapiens
uucugucugacagcuguuugcaga

SEQ ID NO: 1007 - RNA, 24 nt, Homo sapiens
auuccuauuagaucugucgcccua

SEQ ID NO: 1008 - RNA, 24 nt, Homo sapiens
cauuccuauuagaucugucgcccu

SEQ ID NO: 1009 - RNA, 24 nt, Homo sapiens
agcagacuuuuuaagcuuucuuua

SEQ ID NO: 1010 - RNA, 24 nt, Homo sapiens
gcagacuuuuuaagcuuucuuuag

SEQ ID NO: 1011 - RNA, 24 nt, Homo sapiens
uaagcuuucuuuagaagaauauuu

SEQ ID NO: 1012 - RNA, 24 nt, Homo sapiens
aagcuuucuuuagaagaauauuuc

SEQ ID NO: 1013 - RNA, 24 nt, Homo sapiens
agcuuucuuuagaagaauauuuca

SEQ ID NO: 1014 - RNA, 24 nt, Homo sapiens
uuuagaagaauauuucaugagaga

SEQ ID NO: 1015 - RNA, 24 nt, Homo sapiens
gaagaauauuucaugagagauuau

SEQ ID NO: 1016 - RNA, 24 nt, Homo sapiens
ucaguauaaccaaaaaauauacgc

SEQ ID NO: 1017 - RNA, 24 nt, Homo sapiens
acauaauccaucuauuuuucuuga

SEQ ID NO: 1018 - RNA, 24 nt, Homo sapiens
cauaauccaucuauuuuucuugau

SEQ ID NO: 1019 - RNA, 24 nt, Homo sapiens
ucuugauccauaugcuuuuaccug

SEQ ID NO: 1020 - RNA, 24 nt, Homo sapiens
cuugauccauaugcuuuuaccugc

SEQ ID NO: 1021 - RNA, 24 nt, Homo sapiens
uugauccauaugcuuuuaccugca

SEQ ID NO: 1022 - RNA, 24 nt, Homo sapiens
ucaacagaucugucaaaucgccug

SEQ ID NO: 1023 - RNA, 24 nt, Homo sapiens
accugcaggcgauuugacagaucu

SEQ ID NO: 1024 - RNA, 24 nt, Homo sapiens
ccugcaggcgauuugacagaucug

SEQ ID NO: 1025 - RNA, 24 nt, Homo sapiens
acagaucuguugagaaauggcggc

SEQ ID NO: 1026 - RNA, 24 nt, Homo sapiens
uaucauaaugaaaacgccgccauu

SEQ ID NO: 1027 - RNA, 24 nt, Homo sapiens
cauuaugauauaaagauauuuaau

SEQ ID NO: 1028 - RNA, 24 nt, Homo sapiens
uauuuagcauguucccaauucuca

SEQ ID NO: 1029 - RNA, 24 nt, Homo sapiens
gaaaaaacaaaucaaagacuuacc

SEQ ID NO: 1030 - RNA, 24 nt, Homo sapiens
auuuguuuuuucgaaauuguauuu

SEQ ID NO: 1031 - RNA, 24 nt, Homo sapiens
uuuuuucgaaauuguauuuaucuu

SEQ ID NO: 1032 - RNA, 24 nt, Homo sapiens
uucgaaauuguauuuaucuucagc

SEQ ID NO: 1033 - RNA, 24 nt, Homo sapiens
ucgaaauuguauuuaucuucagca

SEQ ID NO: 1034 - RNA, 24 nt, Homo sapiens
cgaaauuguauuuaucuucagcac

SEQ ID NO: 1035 - RNA, 24 nt, Homo sapiens
gaaauuguauuuaucuucagcaca

SEQ ID NO: 1036 - RNA, 24 nt, Homo sapiens
agaaguuaaagaguccagaugugc

SEQ ID NO: 1037 - RNA, 24 nt, Homo sapiens
ucuucagcacaucuggacucuuua

SEQ ID NO: 1038 - RNA, 24 nt, Homo sapiens
caucacccuucagaaccugaucuu

SEQ ID NO: 1039 - RNA, 24 nt, Homo sapiens
acuucuuaaagaucagguucugaa

SEQ ID NO: 1040 - RNA, 24 nt, Homo sapiens
gacuguuguugucaucauuauauu

SEQ ID NO: 1041 - RNA, 24 nt, Homo sapiens
acuguuguugucaucauuauauua

SEQ ID NO: 1042 - RNA, 24 nt, Homo sapiens
aacuagaauaaaaggaaaaauaaa

SEQ ID NO: 1043 - RNA, 24 nt, Homo sapiens
cuacuauauauuuauuuuuccuuu

SEQ ID NO: 1044 - RNA, 24 nt, Homo sapiens
uuuuuccuuuuauucuaguugaaa

SEQ ID NO: 1045 - RNA, 24 nt, Homo sapiens
uccuuuuauucuaguugaaagaau

SEQ ID NO: 1046 - RNA, 24 nt, Homo sapiens
ccuuuuauucuaguugaaagaauu

SEQ ID NO: 1047 - RNA, 24 nt, Homo sapiens
cuuuuauucuaguugaaagaauuc

SEQ ID NO: 1048 - RNA, 24 nt, Homo sapiens
auucuaguugaaagaauucagaau

SEQ ID NO: 1049 - RNA, 24 nt, Homo sapiens
uucuaguugaaagaauucagaauc

SEQ ID NO: 1050 - RNA, 24 nt, Homo sapiens
auucaacuguugccuccgguucug

SEQ ID NO: 1051 - RNA, 24 nt, Homo sapiens
acauuucauucaacuguugccucc

SEQ ID NO: 1052 - RNA, 24 nt, Homo sapiens
cuuuuggauugcaucuacuguaua

SEQ ID NO: 1053 - RNA, 24 nt, Homo sapiens
ugugauuuucuuuuggauugcauc

SEQ ID NO: 1054 - RNA, 24 nt, Homo sapiens
auacuaaccuugguuucugugauu

SEQ ID NO: 1055 - RNA, 24 nt, Homo sapiens
aaaagguaucuuugauacuaaccu

SEQ ID NO: 1056 - RNA, 24 nt, Homo sapiens
aaaaagguaucuuugauacuaacc

SEQ ID NO: 1057 - RNA, 24 nt, Homo sapiens
uuuuaaaaagguaucuuugauacu

SEQ ID NO: 1058 - RNA, 24 nt, Homo sapiens
auuuuaaaaagguaucuuugauac

SEQ ID NO: 1059 - RNA, 24 nt, Homo sapiens
uuaaugcaaacugggacacaaaca

SEQ ID NO: 1060 - RNA, 24 nt, Homo sapiens
uaaauugccauguuugugucccag

SEQ ID NO: 1061 - RNA, 24 nt, Homo sapiens
aaauugccauguuugugucccagu

SEQ ID NO: 1062 - RNA, 24 nt, Homo sapiens
aauugccauguuugugucccaguu

SEQ ID NO: 1063 - RNA, 24 nt, Homo sapiens
ugucccaguuugcauuaacaaaua

SEQ ID NO: 1064 - RNA, 24 nt, Homo sapiens
caacauaguucucaaacuauuugu

SEQ ID NO: 1065 - RNA, 24 nt, Homo sapiens
ccaacauaguucucaaacuauuug

SEQ ID NO: 1066 - RNA, 24 nt, Homo sapiens
uccaacauaguucucaaacuauuu

SEQ ID NO: 1067 - RNA, 24 nt, Homo sapiens
uuuccaacauaguucucaaacuau

SEQ ID NO: 1068 - RNA, 24 nt, Homo sapiens
uuuuccaacauaguucucaaacua

SEQ ID NO: 1069 - RNA, 24 nt, Homo sapiens
uuuuuccaacauaguucucaaacu

SEQ ID NO: 1070 - RNA, 24 nt, Homo sapiens
cauuaacaaauaguuugagaacua

SEQ ID NO: 1071 - RNA, 24 nt, Homo sapiens
agaacuauguuggaaaaaaaaaua

SEQ ID NO: 1072 - RNA, 24 nt, Homo sapiens
guucuucuagccuggagaaagaag

SEQ ID NO: 1073 - RNA, 24 nt, Homo sapiens
auucuucuuucuccaggcuagaag

SEQ ID NO: 1074 - RNA, 24 nt, Homo sapiens
uucuucuuucuccaggcuagaaga

SEQ ID NO: 1075 - RNA, 24 nt, Homo sapiens
uccaggcuagaagaacaaaagaau

SEQ ID NO: 1076 - RNA, 24 nt, Homo sapiens
aaauucugacaagauauucuuuug

SEQ ID NO: 1077 - RNA, 24 nt, Homo sapiens
cuuuuaguugcugcucuuuuccag

SEQ ID NO: 1078 - RNA, 24 nt, Homo sapiens
agaaaauaaaauuaccuugacuug

SEQ ID NO: 1079 - RNA, 24 nt, Homo sapiens
ugcaagcaggcccugggggauuug

SEQ ID NO: 1080 - RNA, 24 nt, Homo sapiens
auuuucucaaaucccccagggccu

SEQ ID NO: 1081 - RNA, 24 nt, Homo sapiens
uuuucucaaaucccccagggccug

SEQ ID NO: 1082 - RNA, 24 nt, Homo sapiens
cucaaaucccccagggccugcuug

SEQ ID NO: 1083 - RNA, 24 nt, Homo sapiens
ucaaaucccccagggccugcuugc

SEQ ID NO: 1084 - RNA, 24 nt, Homo sapiens
uuaauucaaucauugguuuucugc

SEQ ID NO: 1085 - RNA, 24 nt, Homo sapiens
uaauucaaucauugguuuucugcc

SEQ ID NO: 1086 - RNA, 24 nt, Homo sapiens
aauucaaucauugguuuucugccc

SEQ ID NO: 1087 - RNA, 24 nt, Homo sapiens
auucaaucauugguuuucugccca

SEQ ID NO: 1088 - RNA, 24 nt, Homo sapiens
gcaaggaacuaugaauaaccuaau

SEQ ID NO: 1089 - RNA, 24 nt, Homo sapiens
cugcccauuagguuauucauaguu

SEQ ID NO: 1090 - RNA, 24 nt, Homo sapiens
ugcccauuagguuauucauaguuc

SEQ ID NO: 1091 - RNA, 24 nt, Homo sapiens
uagaaaacaauuuaacaggaaaua

SEQ ID NO: 1092 - RNA, 24 nt, Homo sapiens
cuguuaaauuguuuucuauaaacc

SEQ ID NO: 1093 - RNA, 24 nt, Homo sapiens
gaaauaaaaaagauguuacuguau

SEQ ID NO: 1094 - RNA, 24 nt, Homo sapiens
agaaauaaaaaagauguuacugua

SEQ ID NO: 1095 - RNA, 24 nt, Homo sapiens
cuauaaacccuuauacaguaacau

SEQ ID NO: 1096 - RNA, 24 nt, Homo sapiens
uauaaacccuuauacaguaacauc

SEQ ID NO: 1097 - RNA, 24 nt, Homo sapiens
uuauuucuaaaaguguuuuggcug

SEQ ID NO: 1098 - RNA, 24 nt, Homo sapiens
uauuucuaaaaguguuuuggcugg

SEQ ID NO: 1099 - RNA, 24 nt, Homo sapiens
auuucuaaaaguguuuuggcuggu

SEQ ID NO: 1100 - RNA, 24 nt, Homo sapiens
uuucuaaaaguguuuuggcugguc

SEQ ID NO: 1101 - RNA, 24 nt, Homo sapiens
uaaaaguguuuuggcuggucucac

SEQ ID NO: 1102 - RNA, 24 nt, Homo sapiens
cauaauacaaaguaaaguacaauu

SEQ ID NO: 1103 - RNA, 24 nt, Homo sapiens
acauaauacaaaguaaaguacaau

SEQ ID NO: 1104 - RNA, 24 nt, Homo sapiens
ggcuggucucacaauuguacuuua

SEQ ID NO: 1105 - RNA, 24 nt, Homo sapiens
gcuggucucacaauuguacuuuac

SEQ ID NO: 1106 - RNA, 24 nt, Homo sapiens
cuuuguauuauguaaaaggaauac

SEQ ID NO: 1107 - RNA, 24 nt, Homo sapiens
uauuauguaaaaggaauacacaac

SEQ ID NO: 1108 - RNA, 24 nt, Homo sapiens
uucuuacaggcaacaaugcaggau

SEQ ID NO: 1109 - RNA, 24 nt, Homo sapiens
gaacagaggcguccccaguuggaa

SEQ ID NO: 1110 - RNA, 24 nt, Homo sapiens
ggcagcgguaaugaguucuuccaa

SEQ ID NO: 1111 - RNA, 24 nt, Homo sapiens
ucaaauuuugggcagcgguaauga

SEQ ID NO: 1112 - RNA, 24 nt, Homo sapiens
aaaaacaagaccagcaaucaagag

SEQ ID NO: 1113 - RNA, 24 nt, Homo sapiens
ugugucccaugcuuguuaaaaaac

SEQ ID NO: 1114 - RNA, 24 nt, Homo sapiens
uuaacaagcaugggacacacaaag

SEQ ID NO: 1115 - RNA, 24 nt, Homo sapiens
uaacaagcaugggacacacaaagc

SEQ ID NO: 1116 - RNA, 24 nt, Homo sapiens
aacaagcaugggacacacaaagca

SEQ ID NO: 1117 - RNA, 24 nt, Homo sapiens
acaagcaugggacacacaaagcaa

SEQ ID NO: 1118 - RNA, 24 nt, Homo sapiens
uugaaacuugucaugcaucuugcu

SEQ ID NO: 1119 - RNA, 24 nt, Homo sapiens
auugaaacuugucaugcaucuugc

SEQ ID NO: 1120 - RNA, 24 nt, Homo sapiens
uauugaaacuugucaugcaucuug

SEQ ID NO: 1121 - RNA, 24 nt, Homo sapiens
aauaaaaacuuaaguucauauauc

SEQ ID NO: 1122 - RNA, 24 nt, Homo sapiens
gugaauauauuauuggauuucuau

SEQ ID NO: 1123 - RNA, 24 nt, Homo sapiens
aagauaauucaugaacaucuuaau

SEQ ID NO: 1124 - RNA, 24 nt, Homo sapiens
acagaaaagcauacacauuacuua

SEQ ID NO: 1125 - RNA, 24 nt, Homo sapiens
cuguuaaagaggaaguuagaagau

SEQ ID NO: 1126 - RNA, 24 nt, Homo sapiens
uguuaaagaggaaguuagaagauc

SEQ ID NO: 1127 - RNA, 24 nt, Homo sapiens
ccgccuuccacucagagcucagau

SEQ ID NO: 1128 - RNA, 24 nt, Homo sapiens
cccucagcucuugaaguaaacggu

SEQ ID NO: 1129 - RNA, 24 nt, Homo sapiens
cuucaagagcugagggcaaagcag

SEQ ID NO: 1130 - RNA, 24 nt, Homo sapiens
aacaaauagcuagagccaaagaga

SEQ ID NO: 1131 - RNA, 24 nt, Homo sapiens
gaacaaauagcuagagccaaagag

SEQ ID NO: 1132 - RNA, 24 nt, Homo sapiens
gcucuagcuauuuguucaaaagug

SEQ ID NO: 1133 - RNA, 24 nt, Homo sapiens
uucaaaagugcaacuaugaaguga

SEQ ID NO: 1134 - RNA, 24 nt, Homo sapiens
ucucucacccagucaucacuucau

SEQ ID NO: 1135 - RNA, 24 nt, Homo sapiens
cucucucacccagucaucacuuca

SEQ ID NO: 1136 - RNA, 24 nt, Homo sapiens
uauauauauauauauuuuucucuu

SEQ ID NO: 1137 - RNA, 24 nt, Homo sapiens
ucucuuucuauagacagcuaauuc

SEQ ID NO: 1138 - RNA, 24 nt, Homo sapiens
cucuuucuauagacagcuaauuca

SEQ ID NO: 1139 - RNA, 24 nt, Homo sapiens
aaacaguaaaaaaaugaauuagcu

SEQ ID NO: 1140 - RNA, 24 nt, Homo sapiens
ucuuucuauagacagcuaauucau

SEQ ID NO: 1141 - RNA, 24 nt, Homo sapiens
aaaacaguaaaaaaaugaauuagc

SEQ ID NO: 1142 - RNA, 24 nt, Homo sapiens
uauagacagcuaauucauuuuuuu

SEQ ID NO: 1143 - RNA, 24 nt, Homo sapiens
uauucuguaauauaaaaauuuuaa

SEQ ID NO: 1144 - RNA, 24 nt, Homo sapiens
auauucuguaauauaaaaauuuua

SEQ ID NO: 1145 - RNA, 24 nt, Homo sapiens
uuuacuguuuuaaaauuuuuauau

SEQ ID NO: 1146 - RNA, 24 nt, Homo sapiens
uuacuguuuuaaaauuuuuauauu

SEQ ID NO: 1147 - RNA, 24 nt, Homo sapiens
uacuguuuuaaaauuuuuauauua

SEQ ID NO: 1148 - RNA, 24 nt, Homo sapiens
acuguuuuaaaauuuuuauauuac

SEQ ID NO: 1149 - RNA, 24 nt, Homo sapiens
cuguuuuaaaauuuuuauauuaca

SEQ ID NO: 1150 - RNA, 24 nt, Homo sapiens
aaaauuuuuauauuacagaauaua

SEQ ID NO: 1151 - RNA, 24 nt, Homo sapiens
aaauuuuuauauuacagaauauaa

SEQ ID NO: 1152 - RNA, 24 nt, Homo sapiens
uuguagacuaucuuuuauauucug

SEQ ID NO: 1153 - RNA, 24 nt, Homo sapiens
uauauuacagaauauaaaagauag

SEQ ID NO: 1154 - RNA, 24 nt, Homo sapiens
auauuacagaauauaaaagauagu

SEQ ID NO: 1155 - RNA, 24 nt, Homo sapiens
uauuacagaauauaaaagauaguc

SEQ ID NO: 1156 - RNA, 24 nt, Homo sapiens
caaugcugcugucuucuugcuaug

SEQ ID NO: 1157 - RNA, 24 nt, Homo sapiens
caaugggaaaaaguuaacaaaaug

SEQ ID NO: 1158 - RNA, 24 nt, Homo sapiens
ugcaaguaucaagaaaaauauaug

SEQ ID NO: 1159 - RNA, 24 nt, Homo sapiens
ucuugauacuugcagaaaugauuu

SEQ ID NO: 1160 - RNA, 24 nt, Homo sapiens
cuugauacuugcagaaaugauuug

SEQ ID NO: 1161 - RNA, 24 nt, Homo sapiens
uugauacuugcagaaaugauuugu

SEQ ID NO: 1162 - RNA, 24 nt, Homo sapiens
uuuucagggaacuguagaauuuau

SEQ ID NO: 1163 - RNA, 24 nt, Homo sapiens
cauggaggguacugaaauaaauuc

SEQ ID NO: 1164 - RNA, 24 nt, Homo sapiens
ccauggaggguacugaaauaaauu

SEQ ID NO: 1165 - RNA, 24 nt, Homo sapiens
cagggaacuguagaauuuauuuca

SEQ ID NO: 1166 - RNA, 24 nt, Homo sapiens
uccauggaggguacugaaauaaau

SEQ ID NO: 1167 - RNA, 24 nt, Homo sapiens
agggaacuguagaauuuauuucag

SEQ ID NO: 1168 - RNA, 24 nt, Homo sapiens
uuccauggaggguacugaaauaaa

SEQ ID NO: 1169 - RNA, 24 nt, Homo sapiens
ccugucuuuuuuccauggagggua

SEQ ID NO: 1170 - RNA, 24 nt, Homo sapiens
cccugucuuuuuuccauggagggu

SEQ ID NO: 1171 - RNA, 24 nt, Homo sapiens
ucccugucuuuuuuccauggaggg

SEQ ID NO: 1172 - RNA, 24 nt, Homo sapiens
uuucaguacccuccauggaaaaaa

SEQ ID NO: 1173 - RNA, 24 nt, Homo sapiens
aguacccuccauggaaaaaagaca

SEQ ID NO: 1174 - RNA, 24 nt, Homo sapiens
aguuugcaugguucuugcucaagg

SEQ ID NO: 1175 - RNA, 24 nt, Homo sapiens
auaagaaaaugcauuccuugagca

SEQ ID NO: 1176 - RNA, 24 nt, Homo sapiens
cauaagaaaaugcauuccuugagc

SEQ ID NO: 1177 - RNA, 24 nt, Homo sapiens
caugguucuugcucaaggaaugca

SEQ ID NO: 1178 - RNA, 24 nt, Homo sapiens
accuacauguggaaauaaauuuuc

SEQ ID NO: 1179 - RNA, 24 nt, Homo sapiens
gaccuacauguggaaauaaauuuu

SEQ ID NO: 1180 - RNA, 24 nt, Homo sapiens
ugaccuacauguggaaauaaauuu

SEQ ID NO: 1181 - RNA, 24 nt, Homo sapiens
cuuaugaaaauuuauuuccacaug

SEQ ID NO: 1182 - RNA, 24 nt, Homo sapiens
uuaugaaaauuuauuuccacaugu

SEQ ID NO: 1183 - RNA, 24 nt, Homo sapiens
auuacauuuuugaccuacaugugg

SEQ ID NO: 1184 - RNA, 24 nt, Homo sapiens
cauuacauuuuugaccuacaugug

SEQ ID NO: 1185 - RNA, 24 nt, Homo sapiens
ucauuacauuuuugaccuacaugu

SEQ ID NO: 1186 - RNA, 24 nt, Homo sapiens
uuuccacauguaggucaaaaaugu

SEQ ID NO: 1187 - RNA, 24 nt, Homo sapiens
cacauguaggucaaaaauguaaug

SEQ ID NO: 1188 - RNA, 24 nt, Homo sapiens
uugcaauccagccaugauauuuuu

SEQ ID NO: 1189 - RNA, 24 nt, Homo sapiens
acuguugguuuguugcaauccagc

SEQ ID NO: 1190 - RNA, 24 nt, Homo sapiens
cacuguugguuuguugcaauccag

SEQ ID NO: 1191 - RNA, 24 nt, Homo sapiens
aaugcucucauccauagucauagg

SEQ ID NO: 1192 - RNA, 24 nt, Homo sapiens
augucucaguaaucuucuuaccua

SEQ ID NO: 1193 - RNA, 24 nt, Homo sapiens
caaguuauuuaaugucucaguaau

SEQ ID NO: 1194 - RNA, 24 nt, Homo sapiens
acaaguuauuuaaugucucaguaa

SEQ ID NO: 1195 - RNA, 24 nt, Homo sapiens
gacucugaugacauauuuuucccc

SEQ ID NO: 1196 - RNA, 24 nt, Homo sapiens
uccccaguaugguuccagaucaug

SEQ ID NO: 1197 - RNA, 24 nt, Homo sapiens
ccccaguaugguuccagaucaugu

SEQ ID NO: 1198 - RNA, 24 nt, Homo sapiens
cccaguaugguuccagaucauguc

SEQ ID NO: 1199 - RNA, 24 nt, Homo sapiens
uauuugucuuuguguaugugugua

SEQ ID NO: 1200 - RNA, 24 nt, Homo sapiens
ucuuuguguauguguguaugugua

SEQ ID NO: 1201 - RNA, 24 nt, Homo sapiens
uguauguguguauguguauguguu

SEQ ID NO: 1202 - RNA, 24 nt, Homo sapiens
aggccagaccuauuugacuggaau

SEQ ID NO: 1203 - RNA, 24 nt, Homo sapiens
ggccagaccuauuugacuggaaua

SEQ ID NO: 1204 - RNA, 24 nt, Homo sapiens
acuggaauagugugguuugccagc

SEQ ID NO: 1205 - RNA, 24 nt, Homo sapiens
ccagcagucagccacacaacgacu

SEQ ID NO: 1206 - RNA, 24 nt, Homo sapiens
ucuaugccuaauugauaucuggcg

SEQ ID NO: 1207 - RNA, 24 nt, Homo sapiens
ccaaccuucaggaucgaguaguuu

SEQ ID NO: 1208 - RNA, 24 nt, Homo sapiens
uggacuaccacugcuuuuaguaug

SEQ ID NO: 1209 - RNA, 24 nt, Homo sapiens
aguaugguagaguuuaauguuuuc

SEQ ID NO: 1210 - RNA, 24 nt, Homo sapiens
guaugguagaguuuaauguuuuca

SEQ ID NO: 1211 - RNA, 24 nt, Homo sapiens
agacucuaaaaggauaaugaacaa

SEQ ID NO: 1212 - RNA, 24 nt, Homo sapiens
acuuugauuuguucauuauccuuu

SEQ ID NO: 1213 - RNA, 24 nt, Homo sapiens
uauauuugagacucuaaaaggaua

SEQ ID NO: 1214 - RNA, 24 nt, Homo sapiens
auuuguucauuauccuuuuagagu

SEQ ID NO: 1215 - RNA, 24 nt, Homo sapiens
guuucuauauuugagacucuaaaa

SEQ ID NO: 1216 - RNA, 24 nt, Homo sapiens
gguuucuauauuugagacucuaaa

SEQ ID NO: 1217 - RNA, 24 nt, Homo sapiens
ugguuucuauauuugagacucuaa

SEQ ID NO: 1218 - RNA, 24 nt, Homo sapiens
uucauuauccuuuuagagucucaa

SEQ ID NO: 1219 - RNA, 24 nt, Homo sapiens
agagucucaaauauagaaaccaaa

SEQ ID NO: 1220 - RNA, 24 nt, Homo sapiens
gagucucaaauauagaaaccaaaa

SEQ ID NO: 1221 - RNA, 24 nt, Homo sapiens
cacuuccuggauggcuucaaugcu

SEQ ID NO: 1222 - RNA, 24 nt, Homo sapiens
gccucaacaagugagcauugaagc

SEQ ID NO: 1223 - RNA, 24 nt, Homo sapiens
ccucaacaagugagcauugaagcc

SEQ ID NO: 1224 - RNA, 24 nt, Homo sapiens
gguggccuuggcaacauuuccacu

SEQ ID NO: 1225 - RNA, 24 nt, Homo sapiens
gucacuuuagguggccuuggcaac

SEQ ID NO: 1226 - RNA, 24 nt, Homo sapiens
augauguaacugaaaauguucuuc

SEQ ID NO: 1227 - RNA, 24 nt, Homo sapiens
ccuguugagaauagugcauuugau

SEQ ID NO: 1228 - RNA, 24 nt, Homo sapiens
caguuacaucaucaaaugcacuau

SEQ ID NO: 1229 - RNA, 24 nt, Homo sapiens
aguuacaucaucaaaugcacuauu

SEQ ID NO: 1230 - RNA, 24 nt, Homo sapiens
cacacuuuaccuguugagaauagu

SEQ ID NO: 1231 - RNA, 24 nt, Homo sapiens
cuguuuuauaugcauuuuuaggua

SEQ ID NO: 1232 - RNA, 24 nt, Homo sapiens
uguuuuauaugcauuuuuagguau

SEQ ID NO: 1233 - RNA, 24 nt, Homo sapiens
auaugcauuuuuagguauuacgug

SEQ ID NO: 1234 - RNA, 24 nt, Homo sapiens
uaugcauuuuuagguauuacgugc

SEQ ID NO: 1235 - RNA, 24 nt, Homo sapiens
uagguauuacgugcacauauauau

SEQ ID NO: 1236 - RNA, 24 nt, Homo sapiens
agguauuacgugcacauauauaua

SEQ ID NO: 1237 - RNA, 24 nt, Homo sapiens
gguauuacgugcacauauauauau

SEQ ID NO: 1238 - RNA, 24 nt, Homo sapiens
agcaacaacuauaauauugugcag

SEQ ID NO: 1239 - RNA, 24 nt, Homo sapiens
guuccuccaucuuucucuuuuuau

SEQ ID NO: 1240 - RNA, 24 nt, Homo sapiens
ucuuuuuauggaguucacuaggug

SEQ ID NO: 1241 - RNA, 24 nt, Homo sapiens
uauggaguucacuaggugcaccau

SEQ ID NO: 1242 - RNA, 24 nt, Homo sapiens
auggaguucacuaggugcaccauu

SEQ ID NO: 1243 - RNA, 24 nt, Homo sapiens
uggaguucacuaggugcaccauuc

SEQ ID NO: 1244 - RNA, 24 nt, Homo sapiens
auaauugcaucugaacauuugguc

SEQ ID NO: 1245 - RNA, 24 nt, Homo sapiens
guccuuugcagggugagugagcga

SEQ ID NO: 1246 - RNA, 24 nt, Homo sapiens
uuccaaagcagccucucgcucacu

SEQ ID NO: 1247 - RNA, 24 nt, Homo sapiens
cagggugagugagcgagaggcugc

SEQ ID NO: 1248 - RNA, 24 nt, Homo sapiens
gaagaaacucauagauuacugcaa

SEQ ID NO: 1249 - RNA, 24 nt, Homo sapiens
cagguccagggggaacuguugcag

SEQ ID NO: 1250 - RNA, 24 nt, Homo sapiens
ccagguccagggggaacuguugca

SEQ ID NO: 1251 - RNA, 24 nt, Homo sapiens
agcuucuguaagccaggcaagaaa

SEQ ID NO: 1252 - RNA, 24 nt, Homo sapiens
uugccuggcuuacagaagcugaaa

SEQ ID NO: 1253 - RNA, 24 nt, Homo sapiens
cuuacggguagcauccuguaggac

SEQ ID NO: 1254 - RNA, 24 nt, Homo sapiens
cucccuuggagucuucuaggagcc

SEQ ID NO: 1255 - RNA, 24 nt, Homo sapiens
acucccuuggagucuucuaggagc

SEQ ID NO: 1256 - RNA, 24 nt, Homo sapiens
aucagcucuuuuacucccuuggag

SEQ ID NO: 1257 - RNA, 24 nt, Homo sapiens
cgcuuuagcacucuuguggaucca

SEQ ID NO: 1258 - RNA, 24 nt, Homo sapiens
gcacucuuguggauccaauugaac

SEQ ID NO: 1259 - RNA, 24 nt, Homo sapiens
ucccuggcuugucaguuacaagua

SEQ ID NO: 1260 - RNA, 24 nt, Homo sapiens
gucccuggcuugucaguuacaagu

SEQ ID NO: 1261 - RNA, 24 nt, Homo sapiens
uuuugucccuggcuugucaguuac

SEQ ID NO: 1262 - RNA, 24 nt, Homo sapiens
guuuugucccuggcuugucaguua

SEQ ID NO: 1263 - RNA, 24 nt, Homo sapiens
uacuuguaacugacaagccaggga

SEQ ID NO: 1264 - RNA, 24 nt, Homo sapiens
gcuccuacucagacuguuacucug

SEQ ID NO: 1265 - RNA, 24 nt, Homo sapiens
uaccauguauugcuaaacaaagua

SEQ ID NO: 1266 - RNA, 24 nt, Homo sapiens
auugaagaguaacaauuugagcca

SEQ ID NO: 1267 - RNA, 24 nt, Mus musculus
aggcucugcaaaguucuuugaaag

SEQ ID NO: 1268 - RNA, 24 nt, Mus musculus
aaagagcaacaaaauggcuucaac

SEQ ID NO: 1269 - RNA, 24 nt, Mus musculus
aaagagcaauaaaauggcuucaac

SEQ ID NO: 1270 - RNA, 24 nt, Mus musculus
aaagaacuuugcagagccucaaaa

SEQ ID NO: 1271 - RNA, 24 nt, Mus musculus
cugaauaucuaugcauuaauaacu

SEQ ID NO: 1272 - RNA, 24 nt, Mus musculus
uauuauauuacagggcauauuaua

SEQ ID NO: 1273 - RNA, 24 nt, Mus musculus
agguaagccgagguuuggccuuua

SEQ ID NO: 1274 - RNA, 24 nt, Mus musculus
cccagaguccuucaaagauauuga

SEQ ID NO: 1275 - DNA, 19 bp, Homo sapiens
attggctttgatttcccta

SEQ ID NO: 1276 - DNA, 19 bp, Homo sapiens
tgtagagtaagtcagccta

SEQ ID NO: 1277 - DNA, 19 bp, Homo sapiens
cctactcagactgttactc

SEQ ID NO: 1278 - DNA, 19 bp, Homo sapiens
ttggacagaacttaccgac

SEQ ID NO: 1279 - DNA, 19 bp, Homo sapiens
cagttgcctaagaactggt

SEQ ID NO: 1280 - DNA, 19 bp, Homo sapiens
gggctccaccctcacgagt

SEQ ID NO: 1281 - DNA, 19 bp, Homo sapiens
tttgcttcgctataaaacg

SEQ ID NO: 1282 - DNA, 19 bp, Homo sapiens
tctgaggatggggccgcaa

SEQ ID NO: 1283 - DNA, 19 bp, Homo sapiens
gatctgtcaaatcgcctgc

SEQ ID NO: 1284 - DNA, 19 bp, Homo sapiens
ccaggatggcattgggcag

SEQ ID NO: 1285 - DNA, 19 bp, Homo sapiens
ctgaatctgcggtggcagg

SEQ ID NO: 1286 - DNA, 19 bp, Homo sapiens
ttcttttgttcttctagcc

SEQ ID NO: 1287 - DNA, 19 bp, Homo sapiens
gaaaagcttgagcaagtca

SEQ ID NO: 1288 - DNA, 19 bp, Homo sapiens
gaagagttgcccctgcgcc

SEQ ID NO: 1289 - DNA, 19 bp, Homo sapiens
acaaatctccagtggataa

SEQ ID NO: 1290 - DNA, 19 bp, Homo sapiens
tgtttctcaggtaaagctc

SEQ ID NO: 1291 - DNA, 19 bp, Homo sapiens
gaaggaccatttgacgtta

SEQ ID NO: 1292 - DNA, 19 bp, Homo sapiens
aactgctatttcagtttcc

SEQ ID NO: 1293 - DNA, 19 bp, Homo sapiens
ccagccactcagccagtga

SEQ ID NO: 1294 - DNA, 19 bp, Homo sapiens
gtatgcttttctgttaaag

SEQ ID NO: 1295 - DNA, 19 bp, Homo sapiens
ctcctggactgaccactat

SEQ ID NO: 1296 - DNA, 19 bp, Homo sapiens
gaacagaggcgtccccagt

SEQ ID NO: 1297 - DNA, 19 bp, Homo sapiens
gaggctagaacaatcatta

SEQ ID NO: 1298 - DNA, 19 bp, Homo sapiens
acaagaacaccttcagaac

SEQ ID NO: 1299 - DNA, 19 bp, Homo sapiens
ggtttctgtgattttcttt

SEQ ID NO: 1300 - DNA, 19 bp, Homo sapiens
ggccaaagacctccgccag

SEQ ID NO: 1301 - DNA, 19 bp, Homo sapiens
ttggagaagcattcataaa

SEQ ID NO: 1302 - DNA, 19 bp, Homo sapiens
tcgctcactcaccctgcaa

SEQ ID NO: 1303 - DNA, 19 bp, Homo sapiens
aaaagagctgatgaaacaa

SEQ ID NO: 1304 - DNA, 19 bp, Homo sapiens
tacacttttcaaaatgctt

SEQ ID NO: 1305 - DNA, 19 bp, Homo sapiens
gagatgatcatcaagcaga

SEQ ID NO: 1306 - DNA, 19 bp, Mus musculus
ctttgaaagagcaataaaa

SEQ ID NO: 1307 - DNA, 19 bp, Homo sapiens
cacaaaagtcaaatcggaa

SEQ ID NO: 1308 - DNA, 19 bp, Homo sapiens
atttcaatataagattcgg

SEQ ID NO: 1309 - DNA, 19 bp, Homo sapiens
cttaagcaatcccgaactc

SEQ ID NO: 1310 - DNA, 19 bp, Homo sapiens
ccttctttatcccctatcg

SEQ ID NO: 1311 - DNA, 19 bp, Mus musculus
aggccaaacctcggcttac

SEQ ID NO: 1312 - DNA, 19 bp, Mus musculus
ttcgaaaatttcaggtaag

SEQ ID NO: 1313 - DNA, 19 bp, Mus musculus
gcagaacaggagataacag

SEQ ID NO: 1314 - DNA, 19 bp, Mus musculus
gcggccctcgcccttctct

SEQ ID NO: 1315 - DNA, 19 bp, Homo sapiens
tagtgatcgtggatacgag

SEQ ID NO: 1316 - DNA, 19 bp, Homo sapiens
tacagccctcggtgtatat

SEQ ID NO: 1317 - DNA, 19 bp, Homo sapiens
ggaaggaattaagcccgaa

SEQ ID NO: 1318 - DNA, 19 bp, Homo sapiens
ggaacagctttcgtagttg

SEQ ID NO: 1319 - DNA, 19 bp, Homo sapiens
ataaagtccagtgtcgatc

SEQ ID NO: 1320 - DNA, 19 bp, Homo sapiens
aaaaccagagcttcggtca

SEQ ID NO: 1321 - DNA, 21 bp, Mus musculus
gagtcttctgggcaggcttaa

SEQ ID NO: 1322 - DNA, 21 bp, Mus musculus
tcgggtgagcatgtctttaat

SEQ ID NO: 1323 - DNA, 19 bp, Homo sapiens
gtgtcaccagagtaacagt

SEQ ID NO: 1324 - DNA, 19 bp, Homo sapiens
tgatcatcaagcagaaggt

SEQ ID NO: 1325 - DNA, 20 bp, Homo sapiens
aacttcgaaaatttcaggta

SEQ ID NO: 1326 - DNA, 20 bp, Mus musculus
gaaactcatcaaatatgcgt

SEQ ID NO: 1327 - DNA, 20 bp, Mus musculus
tcatttacactaacacgcat

SEQ ID NO: 1328 - DNA, 20 bp, Mus musculus
gaatgaaactcatcaaatat

SEQ ID NO: 1329 - DNA, 20 bp, Mus musculus
tcatcaatatctttgaagga

SEQ ID NO: 1330 - DNA, 20 bp, Mus musculus
tgttttcataggaaaaatag

SEQ ID NO: 1331 - DNA, 20 bp, Mus musculus
aattggaaaatgtgatggga

SEQ ID NO: 1332 - DNA, 20 bp, Homo sapiens
atgatcatcaagcagaaggt

SEQ ID NO: 1333 - DNA, 20 bp, Homo sapiens
agatgatcatcaagcagaag

SEQ ID NO: 1334 - DNA, 20 bp, Homo sapiens
cattttttctcataccttct

SEQ ID NO: 1335 - DNA, 20 bp, Homo sapiens
tcctactcagactgttactc

SEQ ID NO: 1336 - DNA, 20 bp, Homo sapiens
acaggttgtgtcaccagagt

SEQ ID NO: 1337 - DNA, 20 bp, Homo sapiens
ttatcattttttctcatacc

SEQ ID NO: 1338 - DNA, 20 bp, Homo sapiens
ttgcctaagaactggtggga

SEQ ID NO: 1339 - DNA, 20 bp, Homo sapiens
aaacagttgcctaagaactg

SEQ ID NO: 1340 - DNA, 20 bp, Homo sapiens
tttcccaccagttcttaggc

SEQ ID NO: 1341 - DNA, 20 bp, Homo sapiens
tggctttgatttccctaggg

SEQ ID NO: 1342 - DNA, 20 bp, Homo sapiens
tagggaaatcaaagccaatg

SEQ ID NO: 1343 - DNA, 20 bp, Homo sapiens
gaccctagggaaatcaaagc

SEQ ID NO: 1344 - DNA, 20 bp, Homo sapiens
tgagggctccaccctcacga

SEQ ID NO: 1345 - DNA, 20 bp, Homo sapiens
aaggattgagggctccaccc

SEQ ID NO: 1346 - DNA, 20 bp, Homo sapiens
gctccaccctcacgagtggg

SEQ ID NO: 1347 - DNA, 20 bp, Homo sapiens
tatcccctatcgaggaaacc

SEQ ID NO: 1348 - DNA, 20 bp, Homo sapiens
gataaagaaggcctatttca

SEQ ID NO: 1349 - DNA, 20 bp, Homo sapiens
aggccttctttatcccctat

SEQ ID NO: 1350 - DNA, 20 bp, Homo sapiens
tgagggctccaccctcacga

SEQ ID NO: 1351 - DNA, 20 bp, Homo sapiens
gataaagaaggcctatttca

SEQ ID NO: 1352 - DNA, 19 bp, Homo sapiens
attggctttgatttcccta

SEQ ID NO: 1353 - DNA, 19 bp, Homo sapiens
tgtagagtaagtcagccta

SEQ ID NO: 1354 - DNA, 19 bp, Homo sapiens
cctactcagactgttactc

SEQ ID NO: 1355 - DNA, 19 bp, Homo sapiens
ttggacagaacttaccgac

SEQ ID NO: 1356 - DNA, 19 bp, Homo sapiens
cagttgcctaagaactggt

SEQ ID NO: 1357 - DNA, 19 bp, Homo sapiens
gggctccaccctcacgagt

SEQ ID NO: 1358 - DNA, 19 bp, Homo sapiens
tttgcttcgctataaaacg

SEQ ID NO: 1359 - DNA, 19 bp, Homo sapiens
tctgaggatggggccgcaa

SEQ ID NO: 1360 - DNA, 19 bp, Homo sapiens
gatctgtcaaatcgcctgc

SEQ ID NO: 1361 - DNA, 19 bp, Homo sapiens
ccaggatggcattgggcag

SEQ ID NO: 1362 - DNA, 19 bp, Homo sapiens
ctgaatctgcggtggcagg

SEQ ID NO: 1363 - DNA, 19 bp, Homo sapiens
ttcttttgttcttctagcc

SEQ ID NO: 1364 - DNA, 19 bp, Homo sapiens
gaaaagcttgagcaagtca

SEQ ID NO: 1365 - DNA, 19 bp, Homo sapiens
gaagagttgcccctgcgcc

SEQ ID NO: 1366 - DNA, 19 bp, Homo sapiens
acaaatctccagtggataa

SEQ ID NO: 1367 - DNA, 19 bp, Homo sapiens
tgtttctcaggtaaagctc

SEQ ID NO: 1368 - DNA, 19 bp, Homo sapiens
gaaggaccatttgacgtta

SEQ ID NO: 1369 - DNA, 19 bp, Homo sapiens
aactgctatttcagtttcc

SEQ ID NO: 1370 - DNA, 19 bp, Homo sapiens
ccagccactcagccagtga

SEQ ID NO: 1371 - DNA, 19 bp, Homo sapiens
gtatgcttttctgttaaag

SEQ ID NO: 1372 - DNA, 19 bp, Homo sapiens
ctcctggactgaccactat

SEQ ID NO: 1373 - DNA, 19 bp, Homo sapiens
gaacagaggcgtccccagt

SEQ ID NO: 1374 - DNA, 19 bp, Homo sapiens
gaggctagaacaatcatta

SEQ ID NO: 1375 - DNA, 19 bp, Homo sapiens
acaagaacaccttcagaac

SEQ ID NO: 1376 - DNA, 19 bp, Homo sapiens
ggtttctgtgattttcttt

SEQ ID NO: 1377 - DNA, 19 bp, Homo sapiens
ggccaaagacctccgccag

SEQ ID NO: 1378 - DNA, 19 bp, Homo sapiens
ttggagaagcattcataaa

SEQ ID NO: 1379 - DNA, 19 bp, Homo sapiens
tcgctcactcaccctgcaa

SEQ ID NO: 1380 - DNA, 19 bp, Homo sapiens
aaaagagctgatgaaacaa

SEQ ID NO: 1381 - DNA, 19 bp, Homo sapiens
tacacttttcaaaatgctt

SEQ ID NO: 1382 - DNA, 19 bp, Homo sapiens
gagatgatcatcaagcaga

SEQ ID NO: 1383 - DNA, 19 bp, Mus musculus
ctttgaaagagcaataaaa

SEQ ID NO: 1384 - DNA, 19 bp, Homo sapiens
cacaaaagtcaaatcggaa

SEQ ID NO: 1385 - DNA, 19 bp, Homo sapiens
atttcaatataagattcgg

SEQ ID NO: 1386 - DNA, 19 bp, Homo sapiens
cttaagcaatcccgaactc

SEQ ID NO: 1387 - DNA, 19 bp, Homo sapiens
ccttctttatcccctatcg

SEQ ID NO: 1388 - DNA, 19 bp, Mus musculus
aggccaaacctcggcttac

SEQ ID NO: 1389 - DNA, 19 bp, Mus musculus
ttcgaaaatttcaggtaag

SEQ ID NO: 1390 - DNA, 19 bp, Mus musculus
gcagaacaggagataacag

SEQ ID NO: 1391 - DNA, 19 bp, Mus musculus
gcggccctcgcccttctct

SEQ ID NO: 1392 - DNA, 19 bp, Homo sapiens
tagtgatcgtggatacgag

SEQ ID NO: 1393 - DNA, 19 bp, Homo sapiens
tacagccctcggtgtatat

SEQ ID NO: 1394 - DNA, 19 bp, Homo sapiens
ggaaggaattaagcccgaa

SEQ ID NO: 1395 - DNA, 19 bp, Homo sapiens
ggaacagctttcgtagttg

SEQ ID NO: 1396 - DNA, 19 bp, Homo sapiens
ataaagtccagtgtcgatc

SEQ ID NO: 1397 - DNA, 19 bp, Homo sapiens
aaaaccagagcttcggtca

SEQ ID NO: 1398 - DNA, 21 bp, Mus musculus
gagtcttctgggcaggcttaa

SEQ ID NO: 1399 - DNA, 21 bp, Mus musculus
tcgggtgagcatgtctttaat

SEQ ID NO: 1400 - DNA, 19 bp, Homo sapiens
gtgtcaccagagtaacagt

SEQ ID NO: 1401 - DNA, 19 bp, Homo sapiens
tgatcatcaagcagaaggt

SEQ ID NO: 1402 - DNA, 20 bp, Mus musculus
aacttcgaaaatttcaggta

SEQ ID NO: 1403 - DNA, 20 bp, Mus musculus
gaaactcatcaaatatgcgt

SEQ ID NO: 1404 - DNA, 20 bp, Mus musculus
tcatttacactaacacgcat

SEQ ID NO: 1405 - DNA, 20 bp, Mus musculus
gaatgaaactcatcaaatat

SEQ ID NO: 1406 - DNA, 20 bp, Mus musculus
tcatcaatatctttgaagga

SEQ ID NO: 1407 - DNA, 20 bp, Mus musculus
tgttttcataggaaaaatag

SEQ ID NO: 1408 - DNA, 20 bp, Mus musculus
aattggaaaatgtgatggga

SEQ ID NO: 1409 - DNA, 20 bp, Homo sapiens
atgatcatcaagcagaaggt

SEQ ID NO: 1410 - DNA, 20 bp, Homo sapiens
agatgatcatcaagcagaag

SEQ ID NO: 1411 - DNA, 20 bp, Homo sapiens
cattttttctcataccttct

SEQ ID NO: 1412 - DNA, 20 bp, Homo sapiens
tcctactcagactgttactc

SEQ ID NO: 1413 - DNA, 20 bp, Homo sapiens
acaggttgtgtcaccagagt

SEQ ID NO: 1414 - DNA, 20 bp, Homo sapiens
ttatcattttttctcatacc

SEQ ID NO: 1415 - DNA, 20 bp, Homo sapiens
ttgcctaagaactggtggga

SEQ ID NO: 1416 - DNA, 20 bp, Homo sapiens
aaacagttgcctaagaactg

SEQ ID NO: 1417 - DNA, 20 bp, Homo sapiens
tttcccaccagttcttaggc

SEQ ID NO: 1418 - DNA, 20 bp, Homo sapiens
tggctttgatttccctaggg

SEQ ID NO: 1419 - DNA, 20 bp, Homo sapiens
tagggaaatcaaagccaatg

SEQ ID NO: 1420 - DNA, 20 bp, Homo sapiens
gaccctagggaaatcaaagc

SEQ ID NO: 1421 - DNA, 20 bp, Homo sapiens
tgagggctccaccctcacga

SEQ ID NO: 1422 - DNA, 20 bp, Homo sapiens
aaggattgagggctccaccc

SEQ ID NO: 1423 - DNA, 20 bp, Homo sapiens
gctccaccctcacgagtggg

SEQ ID NO: 1424 - DNA, 20 bp, Homo sapiens
tatcccctatcgaggaaacc

SEQ ID NO: 1425 - DNA, 20 bp, Homo sapiens
gataaagaaggcctatttca

SEQ ID NO: 1426 - DNA, 20 bp, Homo sapiens
aggccttctttatcccctat

SEQ ID NO: 1427 - DNA, 20 bp, Homo sapiens
tgagggctccaccctcacga

SEQ ID NO: 1428 - DNA, 20 bp, Homo sapiens
gataaagaaggcctatttca

SEQ ID NO: 1429 - RNA, 20 nt, Homo sapiens
uagaagaucugagcucugag

SEQ ID NO: 1430 - RNA, 20 nt, Homo sapiens
agaucugagcucugagugga

SEQ ID NO: 1431 - RNA, 20 nt, Homo sapiens
ucugagcucugaguggaagg

SEQ ID NO: 1432 - RNA, 20 nt, Homo sapiens
ccguuuacuucaagagcuga

SEQ ID NO: 1433 - RNA, 20 nt, Homo sapiens
aagcagccugaccuagcucc

SEQ ID NO: 1434 - RNA, 20 nt, Homo sapiens
gcuccuggacugaccacuau

SEQ ID NO: 1435 - RNA, 20 nt, Homo sapiens
cccucagcucuugaaguaaa

SEQ ID NO: 1436 - RNA, 20 nt, Homo sapiens
gucaguccaggagcuagguc

SEQ ID NO: 1437 - RNA, 20 nt, Homo sapiens
uaguggucaguccaggagcu

SEQ ID NO: 1438 - RNA, 20 nt, Homo sapiens
gcuccaauaguggucagucc

SEQ ID NO: 1439 - RNA, 20 nt, Homo sapiens
uggccaaagaccuccgccag

SEQ ID NO: 1440 - RNA, 20 nt, Homo sapiens
guggcagacaaauguagaug

SEQ ID NO: 1441 - RNA, 20 nt, Homo sapiens
uguagauguggcaaaugacu

SEQ ID NO: 1442 - RNA, 20 nt, Homo sapiens
cuuggcccugaaacuucucc

SEQ ID NO: 1443 - RNA, 20 nt, Homo sapiens
cagagaauaucaaugccucu

SEQ ID NO: 1444 - RNA, 20 nt, Homo sapiens
cagagaauaucaaugccucu

SEQ ID NO: 1445 - RNA, 20 nt, Homo sapiens
cauuugucugccacuggcgg

SEQ ID NO: 1446 - RNA, 20 nt, Homo sapiens
cuacauuugucugccacugg

SEQ ID NO: 1447 - RNA, 20 nt, Homo sapiens
caucuacauuugucugccac

SEQ ID NO: 1448 - RNA, 20 nt, Homo sapiens
auaaucccggagaaguuuca

SEQ ID NO: 1449 - RNA, 20 nt, Homo sapiens
uaucaucugcagaauaaucc

SEQ ID NO: 1450 - RNA, 20 nt, Homo sapiens
uguuaucauguggacuuuuc

SEQ ID NO: 1451 - RNA, 20 nt, Homo sapiens
ugauauaucauuucucugug

SEQ ID NO: 1452 - RNA, 20 nt, Homo sapiens
uuuaugaaugcuucuccaag

SEQ ID NO: 1453 - RNA, 21 nt, Homo sapiens
uucuccaggcuagaagaacaa

SEQ ID NO: 1454 - RNA, 21 nt, Homo sapiens
cugcucuuuuccagguucaag

SEQ ID NO: 1455 - RNA, 21 nt, Homo sapiens
gucuguuucaguuacuggugg

SEQ ID NO: 1456 - RNA, 21 nt, Homo sapiens
uccaguuucauuuaauuguuu

SEQ ID NO: 1457 - RNA, 21 nt, Homo sapiens
cuuaugggagcacuuacaagc

SEQ ID NO: 1458 - RNA, 21 nt, Homo sapiens
uugcuucauuaccuucacugg

SEQ ID NO: 1459 - RNA, 21 nt, Homo sapiens
uugugucaccagaguaacagu

SEQ ID NO: 1460 - RNA, 21 nt, Homo sapiens
aguaaccacagguugugucac

SEQ ID NO: 1461 - RNA, 21 nt, Homo sapiens
uucaaauuuugggcagcggua

SEQ ID NO: 1462 - RNA, 21 nt, Homo sapiens
caagaggcuagaacaaucauu

SEQ ID NO: 1463 - RNA, 21 nt, Homo sapiens
uuguacuucaucccacugauu

SEQ ID NO: 1464 - RNA, 21 nt, Homo sapiens
cuucagaaccggaggcaacag

SEQ ID NO: 1465 - RNA, 21 nt, Homo sapiens
caacaguugaaugaaauguua

SEQ ID NO: 1466 - RNA, 21 nt, Homo sapiens
gccaagcuugagucauggaag

SEQ ID NO: 1467 - RNA, 21 nt, Homo sapiens
cuugguuucugugauuuucuu

SEQ ID NO: 1468 - RNA, 21 nt, Homo sapiens
ucauuucacaggccuucaaga

SEQ ID NO: 1469 - RNA, 21 nt, Homo sapiens
cagaaauauucguacagucuc

SEQ ID NO: 1470 - RNA, 21 nt, Homo sapiens
caauuaccucugggcuccugg

SEQ ID NO: 1471 - DNA, 20 bp, Homo sapiens
gatactagggtggcaaatag

SEQ ID NO: 1472 - DNA, 20 bp, Homo sapiens
gtgttcttaaaagaatggtg

SEQ ID NO: 1473 - DNA, 20 bp, Homo sapiens
gtcaagaacagctgcagaac

SEQ ID NO: 1474 - DNA, 20 bp, Homo sapiens
gcagttgaatgaaatgttaa

SEQ ID NO: 1475 - DNA, 20 bp, Homo sapiens
gatactagtgtggctcatag

SEQ ID NO: 1476 - DNA, 20 bp, Homo sapiens
gatacgatggtggcaaatcg

SEQ ID NO: 1477 - DNA, 20 bp, Homo sapiens
gatactagggtggggaataa

SEQ ID NO: 1478 - DNA, 20 bp, Homo sapiens
tttttcttaaaagaatggta

SEQ ID NO: 1479 - DNA, 20 bp, Homo sapiens
ttgatcttagaagaatggtg

SEQ ID NO: 1480 - DNA, 20 bp, Homo sapiens
gttttcttgaaaaaatggtg

SEQ ID NO: 1481 - DNA, 20 bp, Homo sapiens
ctgttcttaaaaggttggtg

SEQ ID NO: 1482 - DNA, 20 bp, Homo sapiens
gagttcttcaaagaatagtg

SEQ ID NO: 1483 - DNA, 19 bp, Homo sapiens
tctagggcagctgcagaac

SEQ ID NO: 1484 - DNA, 19 bp, Homo sapiens
tcattcacagctgcagaac

SEQ ID NO: 1485 - DNA, 19 bp, Homo sapiens
caaagaatagctgcagaac

SEQ ID NO: 1486 - DNA, 19 bp, Homo sapiens
tcaagaacagctgcagcag

SEQ ID NO: 1487 - DNA, 19 bp, Homo sapiens
tcaagaacagctgcatcac

SEQ ID NO: 1488 - DNA, 19 bp, Homo sapiens
cagttacatgaaatgttaa

SEQ ID NO: 1489 - DNA, 19 bp, Homo sapiens
cattttaatgaaatgttaa

SEQ ID NO: 1490 - DNA, 19 bp, Homo sapiens
aagttgaatgaaattttaa

SEQ ID NO: 1491 - DNA, 19 bp, Homo sapiens
cagtggaataaaatgttaa

SEQ ID NO: 1492 - DNA, 22 bp, Homo sapiens
aaagatatataatgtcatgaat

SEQ ID NO: 1493 - DNA, 22 bp, Homo sapiens
gcagaatcaaatataatagtct

SEQ ID NO: 1494 - DNA, 20 bp, Homo sapiens
aacaaatatcccttagtatc

SEQ ID NO: 1495 - DNA, 20 bp, Homo sapiens
aatgtatttcttctattcaa

SEQ ID NO: 1496 - DNA, 22 bp, Homo sapiens
aacaataagtcaaatttaattg

SEQ ID NO: 1497 - DNA, 22 bp, Homo sapiens
gaactggtgggaaatggtctag

SEQ ID NO: 1498 - DNA, 22 bp, Homo sapiens
tcctttggtaaataaaagtcct

SEQ ID NO: 1499 - DNA, 22 bp, Homo sapiens
taggaatcaaatggacttggat

SEQ ID NO: 1500 - DNA, 22 bp, Homo sapiens
taattctttctagaaagagcct

SEQ ID NO: 1501 - DNA, 22 bp, Homo sapiens
ctcttgcatcttgcacatgtcc

SEQ ID NO: 1502 - DNA, 22 bp, Homo sapiens
acttagaggtcttctacataca

SEQ ID NO: 1503 - DNA, 22 bp, Homo sapiens
tcagaggtgagtggtgagggga

SEQ ID NO: 1504 - DNA, 22 bp, Homo sapiens
acacacagctgggttatcagag

SEQ ID NO: 1505 - DNA, 19 bp, Homo sapiens
cacagctgggttatcagag

SEQ ID NO: 1506 - DNA, 20 bp, Homo sapiens
acacagctgggttatcagag

SEQ ID NO: 1507 - DNA, 21 bp, Homo sapiens
cacacagctgggttatcagag

SEQ ID NO: 1508 - DNA, 23 bp, Homo sapiens
aacacacagctgggttatcagag

SEQ ID NO: 1509 - DNA, 19 bp, Homo sapiens
ctgstgggaratggtctag

SEQ ID NO: 1510 - DNA, 20 bp, Homo sapiens
actggtgggaaatggtctag

SEQ ID NO: 1511 - DNA, 21 bp, Homo sapiens
aactggtgggaaatggtctag

SEQ ID NO: 1512 - DNA, 23 bp, Homo sapiens
agaactggtgggaaatggtctag

SEQ ID NO: 1513 - DNA, 20 bp, Homo sapiens
atatcttcttaaatacccga

SEQ ID NO: 1514 - DNA, 20 bp, Homo sapiens
agtctcacaaaactgcagag

SEQ ID NO: 1515 - DNA, 20 bp, Homo sapiens
tacttatgtattttaaaaac

SEQ ID NO: 1516 - DNA, 22 bp, Homo sapiens
gaataatttctattatattaca

SEQ ID NO: 1517 - DNA, 22 bp, Homo sapiens
ttcgaaaatttcaggtaagccg

SEQ ID NO: 1518 - DNA, 22 bp, Homo sapiens
tcatttctaaaagtcttttgcc

SEQ ID NO: 1519 - DNA, 22 bp, Homo sapiens
tttgagacacagtataggttat

SEQ ID NO: 1520 - DNA, 20 bp, Homo sapiens
atataatagaaattattcat

SEQ ID NO: 1521 - DNA, 20 bp, Homo sapiens
taatatgccctgtaatataa

SEQ ID NO: 1522 - DNA, 20 bp, Homo sapiens
tgatatcatcaatatctttg

SEQ ID NO: 1523 - DNA, 20 bp, Homo sapiens
gcaattaattggaaaatgtg

SEQ ID NO: 1524 - DNA, 21 bp, Homo sapiens
ctttaagcttaggtaaaatca

SEQ ID NO: 1525 - DNA, 20 bp, Homo sapiens
cagtaatgtgtcataccttc

SEQ ID NO: 1526 - DNA, 20 bp, Homo sapiens
cagggcatattatatttaga

SEQ ID NO: 1527 - DNA, 20 bp, Homo sapiens
caaaagccaaatctatttca

SEQ ID NO: 1528 - DNA, 26 bp, Homo sapiens
atgctttggtgggaagaagtagagga

SEQ ID NO: 1529 - DNA, 26 bp, Homo sapiens
atgctttggtgggaagaatagaggac

SEQ ID NO: 1530 - DNA, 23 bp, Homo sapiens
ttgtgacaagctcactaattagg

SEQ ID NO: 1531 - DNA, 23 bp, Homo sapiens
aagtttgaagaacttttaccagg

SEQ ID NO: 1532 - DNA, 23 bp, Homo sapiens
aggcagcgataaaaaaaacctgg

SEQ ID NO: 1533 - DNA, 23 bp, Homo sapiens
gctttggtgggaagaagtagagg

SEQ ID NO: 1534 - DNA, 19 bp, Homo sapiens
gctgggtgtcccattgaaa

SEQ ID NO: 1535 - DNA, 19 bp, Homo sapiens
cagccgctcgctgcagcag

SEQ ID NO: 1536 - DNA, 19 bp, Homo sapiens
tggagagtttgcaaggagc

SEQ ID NO: 1537 - DNA, 19 bp, Homo sapiens
gtttattcagccgggagtc

SEQ ID NO: 1538 - DNA, 20 bp, Homo sapiens
cgccaggaggggtgggtcta

SEQ ID NO: 1539 - DNA, 19 bp, Homo sapiens
ccttggtgagactggtaga

SEQ ID NO: 1540 - DNA, 19 bp, Homo sapiens
gtcttcaggttctgttgct

SEQ ID NO: 1541 - DNA, 19 bp, Homo sapiens
atattcctgatttaaaagt

SEQ ID NO: 1542 - DNA, 19 bp, Homo sapiens
ttaaaagtcggctggtagc

SEQ ID NO: 1543 - DNA, 19 bp, Homo sapiens
cgggccgggggcggggtcc

SEQ ID NO: 1544 - DNA, 19 bp, Homo sapiens
gcccgagccgcgtgtggaa

SEQ ID NO: 1545 - DNA, 19 bp, Homo sapiens
ccttcattgcggcgggctg

SEQ ID NO: 1546 - DNA, 19 bp, Homo sapiens
ccgacccctcccgggtccc

SEQ ID NO: 1547 - DNA, 19 bp, Homo sapiens
caggaccgcgcttcccacg

SEQ ID NO: 1548 - DNA, 19 bp, Homo sapiens
tgcaccctgggagcgcgag

SEQ ID NO: 1549 - DNA, 19 bp, Homo sapiens
ccgcacgcacctgttccca

SEQ ID NO: 1550 - DNA, 19 bp, Homo sapiens
aaaacagcgagggagaaac

SEQ ID NO: 1551 - DNA, 19 bp, Homo sapiens
ttaacttgattgtgaaatc

SEQ ID NO: 1552 - DNA, 19 bp, Homo sapiens
aaaacaatgcatatttgca

SEQ ID NO: 1553 - DNA, 19 bp, Homo sapiens
aaaatccagtattttaatg

SEQ ID NO: 1554 - DNA, 19 bp, Homo sapiens
acccagcactgcagcctgg

SEQ ID NO: 1555 - DNA, 19 bp, Homo sapiens
aacttatgcggcgtttcct

SEQ ID NO: 1556 - DNA, 19 bp, Homo sapiens
tcactttaaaaccacctct

SEQ ID NO: 1557 - DNA, 19 bp, Homo sapiens
gcatctttttctctttaat

SEQ ID NO: 1558 - DNA, 19 bp, Homo sapiens
tgtactctctgaggtgctc

SEQ ID NO: 1559 - DNA, 19 bp, Homo sapiens
acgcagataagaaccagtt

SEQ ID NO: 1560 - DNA, 19 bp, Homo sapiens
catcaagtcagccatcagc

SEQ ID NO: 1561 - DNA, 19 bp, Homo sapiens
gagtcaccctcctggaaac

SEQ ID NO: 1562 - DNA, 19 bp, Homo sapiens
gctagggatgaagaataaa

SEQ ID NO: 1563 - DNA, 19 bp, Homo sapiens
ttgaccaatagccttgaca

SEQ ID NO: 1564 - DNA, 19 bp, Homo sapiens
tgcaaatatctgtctgaaa

SEQ ID NO: 1565 - DNA, 19 bp, Homo sapiens
aaattagcagtatcctctt

SEQ ID NO: 1566 - DNA, 19 bp, Homo sapiens
cctgggctccggggcgttt

SEQ ID NO: 1567 - DNA, 19 bp, Homo sapiens
ggcccctgcggccaccccg

SEQ ID NO: 1568 - DNA, 19 bp, Homo sapiens
ctccctccctgcccggtag

SEQ ID NO: 1569 - DNA, 19 bp, Homo sapiens
aggtttggaaagggcgtgc

SEQ ID NO: 1570 - DNA, 20 bp, Homo sapiens
gattggctttgatttcccta

SEQ ID NO: 1571 - DNA, 23 bp, Homo sapiens
gtgtagagtaagtcagcctatgg

SEQ ID NO: 1572 - DNA, 20 bp, Homo sapiens
gcctactcagactgttactc

SEQ ID NO: 1573 - DNA, 23 bp, Homo sapiens
gttggacagaacttaccgactgg

SEQ ID NO: 1574 - DNA, 20 bp, Homo sapiens
gcagttgcctaagaactggt

SEQ ID NO: 1575 - DNA, 20 bp, Homo sapiens
ggggctccaccctcacgagt

SEQ ID NO: 1576 - DNA, 23 bp, Homo sapiens
gtttgcttcgctataaaacgagg

SEQ ID NO: 1577 - DNA, 23 bp, Homo sapiens
gtctgaggatggggccgcaatgg

SEQ ID NO: 1578 - DNA, 23 bp, Homo sapiens
ggatctgtcaaatcgcctgcagg

SEQ ID NO: 1579 - DNA, 23 bp, Homo sapiens
gccaggatggcattgggcagcgg

SEQ ID NO: 1580 - DNA, 23 bp, Homo sapiens
gctgaatctgcggtggcaggagg

SEQ ID NO: 1581 - DNA, 23 bp, Homo sapiens
gttcttttgttcttctagcctgg

SEQ ID NO: 1582 - DNA, 23 bp, Homo sapiens
ggaaaagcttgagcaagtcaagg

SEQ ID NO: 1583 - DNA, 23 bp, Homo sapiens
ggaagagttgcccctgcgccagg

SEQ ID NO: 1584 - DNA, 23 bp, Homo sapiens
gacaaatctccagtggataaagg

SEQ ID NO: 1585 - DNA, 23 bp, Homo sapiens
gtgtttctcaggtaaagctctgg

SEQ ID NO: 1586 - DNA, 23 bp, Homo sapiens
ggaaggaccatttgacgttaagg

SEQ ID NO: 1587 - DNA, 23 bp, Homo sapiens
gaactgctatttcagtttcctgg

SEQ ID NO: 1588 - DNA, 23 bp, Homo sapiens
gccagccactcagccagtgaagg

SEQ ID NO: 1589 - DNA, 23 bp, Homo sapiens
ggtatgcttttctgttaaagagg

SEQ ID NO: 1590 - DNA, 23 bp, Homo sapiens
gctcctggactgaccactattgg

SEQ ID NO: 1591 - DNA, 23 bp, Homo sapiens
ggaacagaggcgtccccagttgg

SEQ ID NO: 1592 - DNA, 23 bp, Homo sapiens
ggaggctagaacaatcattacgg

SEQ ID NO: 1593 - DNA, 23 bp, Homo sapiens
gacaagaacaccttcagaaccgg

SEQ ID NO: 1594 - DNA, 23 bp, Homo sapiens
gggtttctgtgattttcttttgg

SEQ ID NO: 1595 - DNA, 23 bp, Homo sapiens
gggccaaagacctccgccagtgg

SEQ ID NO: 1596 - DNA, 23 bp, Homo sapiens
gttggagaagcattcataaaagg

SEQ ID NO: 1597 - DNA, 23 bp, Homo sapiens
gtcgctcactcaccctgcaaagg

SEQ ID NO: 1598 - DNA, 23 bp, Homo sapiens
gaaaagagctgatgaaacaatgg

SEQ ID NO: 1599 - DNA, 23 bp, Homo sapiens
gtacacttttcaaaatgctttgg

SEQ ID NO: 1600 - DNA, 23 bp, Homo sapiens
ggagatgatcatcaagcagaagg

SEQ ID NO: 1601 - DNA, 23 bp, Homo sapiens
gctttgaaagagcaataaaatgg

SEQ ID NO: 1602 - DNA, 23 bp, Homo sapiens
gcacaaaagtcaaatcggaatgg

SEQ ID NO: 1603 - DNA, 23 bp, Homo sapiens
gatttcaatataagattcggagg

SEQ ID NO: 1604 - DNA, 23 bp, Homo sapiens
gcttaagcaatcccgaactctgg

SEQ ID NO: 1605 - DNA, 20 bp, Homo sapiens
gccttctttatcccctatcg

SEQ ID NO: 1606 - DNA, 25 bp, Homo sapiens
  misc_feature (21)..(22): n is a, c, g, or t
gaggccaaacctcggcttacnngrr

SEQ ID NO: 1607 - DNA, 25 bp, Homo sapiens
  misc_feature (21)..(22): n is a, c, g, or t
gttcgaaaatttcaggtaagnngrr

SEQ ID NO: 1608 - DNA, 26 bp, Homo sapiens
  misc_feature (21)..(22): n is a, c, g, or t
ggcagaacaggagataacagnngrrt

SEQ ID NO: 1609 - DNA, 26 bp, Homo sapiens
ggcggccctcgcccttctctggggat

SEQ ID NO: 1610 - DNA, 23 bp, Homo sapiens
gtagtgatcgtggatacgagagg

SEQ ID NO: 1611 - DNA, 23 bp, Homo sapiens
gtacagccctcggtgtatattgg

SEQ ID NO: 1612 - DNA, 23 bp, Homo sapiens
gggaaggaattaagcccgaatgg

SEQ ID NO: 1613 - DNA, 23 bp, Homo sapiens
gggaacagctttcgtagttgagg

SEQ ID NO: 1614 - DNA, 23 bp, Homo sapiens
gataaagtccagtgtcgatcagg

SEQ ID NO: 1615 - DNA, 23 bp, Homo sapiens
gaaaaccagagcttcggtcaagg

SEQ ID NO: 1616 - DNA, 34 bp, Homo sapiens
ggagtcttctgggcaggcttaaaggctaacctgg

SEQ ID NO: 1617 - DNA, 34 bp, Homo sapiens
gtcgggtgagcatgtctttaatctacctcgatgg

SEQ ID NO: 1618 - DNA, 26 bp, Homo sapiens
ggtgtcaccagagtaacagtctgagt

SEQ ID NO: 1619 - DNA, 25 bp, Homo sapiens
gtgatcatcaagcagaaggtatgag

SEQ ID NO: 1620 - DNA, 29 bp, Homo sapiens
gaacttcgaaaatttcaggtaagccgagg

SEQ ID NO: 1621 - DNA, 29 bp, Homo sapiens
ggaaactcatcaaatatgcgtgttagtgt

SEQ ID NO: 1622 - DNA, 29 bp, Homo sapiens
gtcatttacactaacacgcatatttgatg

SEQ ID NO: 1623 - DNA, 29 bp, Homo sapiens
ggaatgaaactcatcaaatatgcgtgtta

SEQ ID NO: 1624 - DNA, 29 bp, Homo sapiens
gtcatcaatatctttgaaggactctgggt

SEQ ID NO: 1625 - DNA, 29 bp, Homo sapiens
gtgttttcataggaaaaataggcaagttg

SEQ ID NO: 1626 - DNA, 29 bp, Homo sapiens
gaattggaaaatgtgatgggaaacagata

SEQ ID NO: 1627 - DNA, 29 bp, Homo sapiens
gatgatcatcaagcagaaggtatgagaaa

SEQ ID NO: 1628 - DNA, 29 bp, Homo sapiens
gagatgatcatcaagcagaaggtatgaga

SEQ ID NO: 1629 - DNA, 29 bp, Homo sapiens
gcattttttctcataccttctgcttgatg

SEQ ID NO: 1630 - DNA, 29 bp, Homo sapiens
gtcctactcagactgttactctggtgaca

SEQ ID NO: 1631 - DNA, 29 bp, Homo sapiens
gacaggttgtgtcaccagagtaacagtct

SEQ ID NO: 1632 - DNA, 29 bp, Homo sapiens
gttatcattttttctcataccttctgctt

SEQ ID NO: 1633 - DNA, 29 bp, Homo sapiens
gttgcctaagaactggtgggaaatggtct

SEQ ID NO: 1634 - DNA, 29 bp, Homo sapiens
gaaacagttgcctaagaactggtgggaaa

SEQ ID NO: 1635 - DNA, 29 bp, Homo sapiens
gtttcccaccagttcttaggcaactgttt

SEQ ID NO: 1636 - DNA, 29 bp, Homo sapiens
gtggctttgatttccctagggtccagctt

SEQ ID NO: 1637 - DNA, 29 bp, Homo sapiens
gtagggaaatcaaagccaatgaaacgttc

SEQ ID NO: 1638 - DNA, 29 bp, Homo sapiens
ggaccctagggaaatcaaagccaatgaaa

SEQ ID NO: 1639 - DNA, 29 bp, Homo sapiens
gtgagggctccaccctcacgagtgggttt

SEQ ID NO: 1640 - DNA, 29 bp, Homo sapiens
gaaggattgagggctccaccctcacgagt

SEQ ID NO: 1641 - DNA, 29 bp, Homo sapiens
ggctccaccctcacgagtgggtttggttc

SEQ ID NO: 1642 - DNA, 29 bp, Homo sapiens
gtatcccctatcgaggaaaccacgagttt

SEQ ID NO: 1643 - DNA, 29 bp, Homo sapiens
ggataaagaaggcctatttcatagagttg

SEQ ID NO: 1644 - DNA, 29 bp, Homo sapiens
gaggccttctttatcccctatcgaggaaa

SEQ ID NO: 1645 - DNA, 27 bp, Homo sapiens
gtgagggctccaccctcacgagtgggt

SEQ ID NO: 1646 - DNA, 27 bp, Homo sapiens
ggataaagaaggcctatttcatagagt

SEQ ID NO: 1647 - DNA, 24 bp, Homo sapiens
caccgcagccgctcgctgcagcag

SEQ ID NO: 1648 - DNA, 24 bp, Homo sapiens
aaacctgctgcagcgagcggctgc

SEQ ID NO: 1649 - DNA, 24 bp, Homo sapiens
caccggctgggtgtcccattgaaa

SEQ ID NO: 1650 - DNA, 24 bp, Homo sapiens
aaactttcaatgggacacccagcc

SEQ ID NO: 1651 - DNA, 24 bp, Homo sapiens
caccggtttattcagccgggagtc

SEQ ID NO: 1652 - DNA, 24 bp, Homo sapiens
aaacgactcccggctgaataaacc

SEQ ID NO: 1653 - DNA, 24 bp, Homo sapiens
caccgtggagagtttgcaaggagc

SEQ ID NO: 1654 - DNA, 24 bp, Homo sapiens
aaacgctccttgcaaactctccac

SEQ ID NO: 1655 - DNA, 24 bp, Homo sapiens
caccgccctccagactttccacct

SEQ ID NO: 1656 - DNA, 24 bp, Homo sapiens
aaacaggtggaaagtctggagggc

SEQ ID NO: 1657 - DNA, 24 bp, Homo sapiens
caccgaattttcttccaagttctc

SEQ ID NO: 1658 - DNA, 24 bp, Homo sapiens
aaacgagaacttggaagaaaattc

SEQ ID NO: 1659 - DNA, 24 bp, Homo sapiens
caccgctgcggagagaagaaaggg

SEQ ID NO: 1660 - DNA, 24 bp, Homo sapiens
aaacccctttcttctctccgcagc

SEQ ID NO: 1661 - DNA, 24 bp, Homo sapiens
caccgagagccaccccctggctcc

SEQ ID NO: 1662 - DNA, 24 bp, Homo sapiens
aaacggagccagggggtggctctc

SEQ ID NO: 1663 - DNA, 24 bp, Homo sapiens
caccgcgaagccaaccgcggcggg

SEQ ID NO: 1664 - DNA, 24 bp, Homo sapiens
aaaccccgccgcggttggcttcgc

SEQ ID NO: 1665 - DNA, 24 bp, Homo sapiens
caccgagagggaagacgatcgccc

SEQ ID NO: 1666 - DNA, 24 bp, Homo sapiens
aaacgggcgatcgtcttccctctc

SEQ ID NO: 1667 - DNA, 24 bp, Homo sapiens
caccgcccctttaactttcctccg

SEQ ID NO: 1668 - DNA, 24 bp, Homo sapiens
aaaccggaggaaagttaaaggggc

SEQ ID NO: 1669 - DNA, 24 bp, Homo sapiens
caccggcagccccgcttccttcaa

SEQ ID NO: 1670 - DNA, 24 bp, Homo sapiens
aaacttgaaggaagcggggctgcc

SEQ ID NO: 1671 - DNA, 24 bp, Homo sapiens
caccgcgagagcgagaggagggag

SEQ ID NO: 1672 - DNA, 24 bp, Homo sapiens
aaacctccctcctctcgctctcgc

SEQ ID NO: 1673 - DNA, 24 bp, Homo sapiens
caccggagagagcttgagagcgcg

SEQ ID NO: 1674 - DNA, 24 bp, Homo sapiens
aaaccgcgctctcaagctctctcc

SEQ ID NO: 1675 - DNA, 24 bp, Homo sapiens
caccgggtggagggggcggggccc

SEQ ID NO: 1676 - DNA, 24 bp, Homo sapiens
aaacgggccccgccccctccaccc

SEQ ID NO: 1677 - DNA, 24 bp, Homo sapiens
caccgggtatccacgtaaatcaaa

SEQ ID NO: 1678 - DNA, 24 bp, Homo sapiens
aaactttgatttacgtggataccc

SEQ ID NO: 1679 - DNA, 24 bp, Homo sapiens
caccgccaatcactggctccggtc

SEQ ID NO: 1680 - DNA, 24 bp, Homo sapiens
aaacgaccggagccagtgattggc

SEQ ID NO: 1681 - DNA, 24 bp, Homo sapiens
caccgggcgcccgagggaagaaga

SEQ ID NO: 1682 - DNA, 24 bp, Homo sapiens
aaactcttcttccctcgggcgccc

SEQ ID NO: 1683 - DNA, 24 bp, Homo sapiens
caccggggtgggggtaccagagga

SEQ ID NO: 1684 - DNA, 24 bp, Homo sapiens
aaactcctctggtacccccacccc

SEQ ID NO: 1685 - DNA, 24 bp, Homo sapiens
caccgccggggacagaagagaggg

SEQ ID NO: 1686 - DNA, 24 bp, Homo sapiens
aaacccctctcttctgtccccggc

SEQ ID NO: 1687 - DNA, 24 bp, Homo sapiens
caccggagagagagtgggagaagc

SEQ ID NO: 1688 - DNA, 24 bp, Homo sapiens
aaacgcttctcccactctctctcc

SEQ ID NO: 1689 - DNA, 24 bp, Homo sapiens
caccgaaagtaactgtcaaatgcg

SEQ ID NO: 1690 - DNA, 24 bp, Homo sapiens
aaaccgcatttgacagttactttc

SEQ ID NO: 1691 - DNA, 24 bp, Homo sapiens
caccgttaaccagagcgcccagtc

SEQ ID NO: 1692 - DNA, 24 bp, Homo sapiens
aaacgactgggcgctctggttaac

SEQ ID NO: 1693 - DNA, 24 bp, Homo sapiens
caccgcgtcggagctgcccgctag

SEQ ID NO: 1694 - DNA, 24 bp, Homo sapiens
aaacctagcgggcagctccgacgc

SEQ ID NO: 1695 - DNA, 19 bp, Homo sapiens
tgtactctctgaggtgctc

SEQ ID NO: 1696 - DNA, 19 bp, Homo sapiens
acgcagataagaaccagtt

SEQ ID NO: 1697 - DNA, 19 bp, Homo sapiens
catcaagtcagccatcagc

SEQ ID NO: 1698 - DNA, 19 bp, Homo sapiens
gagtcaccctcctggaaac

SEQ ID NO: 1699 - DNA, 19 bp, Homo sapiens
cctgggctccggggcgttt

SEQ ID NO: 1700 - DNA, 19 bp, Homo sapiens
ggcccctgcggccaccccg

SEQ ID NO: 1701 - DNA, 19 bp, Homo sapiens
ctccctccctgcccggtag

SEQ ID NO: 1702 - DNA, 19 bp, Homo sapiens
aggtttggaaagggcgtgc

SEQ ID NO: 1703 - DNA, 20 bp, Homo sapiens
actccactgcactccagtct

SEQ ID NO: 1704 - DNA, 20 bp, Homo sapiens
tctgtgggggacctgcactg

SEQ ID NO: 1705 - DNA, 20 bp, Homo sapiens
ggggcgccagttgtgtctcc

SEQ ID NO: 1706 - DNA, 20 bp, Homo sapiens
acaccattgccaccaccatt

SEQ ID NO: 1707 - DNA, 20 bp, Homo sapiens
caatgaccccttcattgacc

SEQ ID NO: 1708 - DNA, 20 bp, Homo sapiens
ttgattttggagggatctcg

SEQ ID NO: 1709 - DNA, 20 bp, Homo sapiens
ggaatccatggagggaagat

SEQ ID NO: 1710 - DNA, 20 bp, Homo sapiens
tgttctcgctcaggtcagtg

SEQ ID NO: 1711 - DNA, 20 bp, Homo sapiens
ctctctgctcctttgccaca

SEQ ID NO: 1712 - DNA, 20 bp, Homo sapiens
gtgctcttcgggtttcagga

SEQ ID NO: 1713 - DNA, 30 bp, Homo sapiens
cgaaagagaaagcgaaccagtatcgagaac

SEQ ID NO: 1714 - DNA, 27 bp, Homo sapiens
cgttgtgcatagtcgctgcttgatcgc

SEQ ID NO: 1715 - RNA, 20 nt, Homo sapiens
uagaagaucugagcucugag

SEQ ID NO: 1716 - RNA, 20 nt, Homo sapiens
agaucugagcucugagugga

SEQ ID NO: 1717 - RNA, 20 nt, Homo sapiens
ucugagcucugaguggaagg

SEQ ID NO: 1718 - RNA, 20 nt, Homo sapiens
ccguuuacuucaagagcuga

SEQ ID NO: 1719 - RNA, 20 nt, Homo sapiens
aagcagccugaccuagcucc

SEQ ID NO: 1720 - RNA, 20 nt, Homo sapiens
gcuccuggacugaccacuau

SEQ ID NO: 1721 - RNA, 20 nt, Homo sapiens
cccucagcucuugaaguaaa

SEQ ID NO: 1722 - RNA, 20 nt, Homo sapiens
gucaguccaggagcuagguc

SEQ ID NO: 1723 - RNA, 20 nt, Homo sapiens
uaguggucaguccaggagcu

SEQ ID NO: 1724 - RNA, 20 nt, Homo sapiens
gcuccaauaguggucagucc

SEQ ID NO: 1725 - RNA, 20 nt, Homo sapiens
uggccaaagaccuccgccag

SEQ ID NO: 1726 - RNA, 20 nt, Homo sapiens
guggcagacaaauguagaug

SEQ ID NO: 1727 - RNA, 20 nt, Homo sapiens
uguagauguggcaaaugacu

SEQ ID NO: 1728 - RNA, 20 nt, Homo sapiens
cuuggcccugaaacuucucc

SEQ ID NO: 1729 - RNA, 20 nt, Homo sapiens
cagagaauaucaaugccucu

SEQ ID NO: 1730 - RNA, 20 nt, Homo sapiens
cagagaauaucaaugccucu

SEQ ID NO: 1731 - RNA, 20 nt, Homo sapiens
cauuugucugccacuggcgg

SEQ ID NO: 1732 - RNA, 20 nt, Homo sapiens
cuacauuugucugccacugg

SEQ ID NO: 1733 - RNA, 20 nt, Homo sapiens
caucuacauuugucugccac

SEQ ID NO: 1734 - RNA, 20 nt, Homo sapiens
auaaucccggagaaguuuca

SEQ ID NO: 1735 - RNA, 20 nt, Homo sapiens
uaucaucugcagaauaaucc

SEQ ID NO: 1736 - RNA, 20 nt, Homo sapiens
uguuaucauguggacuuuuc

SEQ ID NO: 1737 - RNA, 20 nt, Homo sapiens
ugauauaucauuucucugug

SEQ ID NO: 1738 - RNA, 20 nt, Homo sapiens
uuuaugaaugcuucuccaag

SEQ ID NO: 1739 - RNA, 21 nt, Homo sapiens
uucuccaggcuagaagaacaa

SEQ ID NO: 1740 - RNA, 21 nt, Homo sapiens
cugcucuuuuccagguucaag

SEQ ID NO: 1741 - RNA, 21 nt, Homo sapiens
gucuguuucaguuacuggugg

SEQ ID NO: 1742 - RNA, 21 nt, Homo sapiens
uccaguuucauuuaauuguuu

SEQ ID NO: 1743 - RNA, 21 nt, Homo sapiens
cuuaugggagcacuuacaagc

SEQ ID NO: 1744 - RNA, 21 nt, Homo sapiens
uugcuucauuaccuucacugg

SEQ ID NO: 1745 - RNA, 21 nt, Homo sapiens
uugugucaccagaguaacagu

SEQ ID NO: 1746 - RNA, 21 nt, Homo sapiens
aguaaccacagguugugucac

SEQ ID NO: 1747 - RNA, 21 nt, Homo sapiens
uucaaauuuugggcagcggua

SEQ ID NO: 1748 - RNA, 21 nt, Homo sapiens
caagaggcuagaacaaucauu

SEQ ID NO: 1749 - RNA, 21 nt, Homo sapiens
uuguacuucaucccacugauu

SEQ ID NO: 1750 - RNA, 21 nt, Homo sapiens
cuucagaaccggaggcaacag

SEQ ID NO: 1751 - RNA, 21 nt, Homo sapiens
caacaguugaaugaaauguua

SEQ ID NO: 1752 - RNA, 21 nt, Homo sapiens
gccaagcuugagucauggaag

SEQ ID NO: 1753 - RNA, 21 nt, Homo sapiens
cuugguuucugugauuuucuu

SEQ ID NO: 1754 - RNA, 21 nt, Homo sapiens
ucauuucacaggccuucaaga

SEQ ID NO: 1755 - RNA, 21 nt, Homo sapiens
cagaaauauucguacagucuc

SEQ ID NO: 1756 - RNA, 21 nt, Homo sapiens
caauuaccucugggcuccugg

SEQ ID NO: 1757 - RNA, 19 nt, Homo sapiens
gaacuucuauuuaauuuug

SEQ ID NO: 1758 - RNA, 20 nt, Homo sapiens
auuucagguaagccgagguu

SEQ ID NO: 1759 - RNA, 20 nt, Homo sapiens
ucuuaauaauguuucacugu

SEQ ID NO: 1760 - RNA, 20 nt, Homo sapiens
auaauuucuauuauauuaca

SEQ ID NO: 1761 - RNA, 20 nt, Homo sapiens
uuucauucauaucaagaaga

SEQ ID NO: 1762 - RNA, 20 nt, Homo sapiens
auaguuuaaaggccaaaccu

SEQ ID NO: 1763 - RNA, 20 nt, Homo sapiens
ugugaaaaaauauaguuuaa

SEQ ID NO: 1764 - RNA, 20 nt, Homo sapiens
cgaaaauuucagguaagccg

SEQ ID NO: 1765 - DNA, 23 bp, Homo sapiens
caaaaacccaaaatattttagct

SEQ ID NO: 1766 - DNA, 23 bp, Homo sapiens
cctttttggtatcttacaggaac

SEQ ID NO: 1767 - DNA, 23 bp, Homo sapiens
ccgctgcccaatgccatcctgga

SEQ ID NO: 1768 - DNA, 23 bp, Homo sapiens
tttttccttttattctagttgaa

SEQ ID NO: 1769 - DNA, 23 bp, Homo sapiens
ttgatccatatgcttttacctgc

SEQ ID NO: 1770 - DNA, 23 bp, Homo sapiens
tcaacagatctgtcaaatcgcct

SEQ ID NO: 1771 - DNA, 23 bp, Homo sapiens
ttcttctttctccaggctagaag

SEQ ID NO: 1772 - DNA, 23 bp, Homo sapiens
gttcttctagcctggagaaagaa

SEQ ID NO: 1773 - DNA, 23 bp, Homo sapiens
caaatcctgcattgttgcctgta

SEQ ID NO: 1774 - DNA, 23 bp, Homo sapiens
ctgttaaagaggaagttagaaga

SEQ ID NO: 1775 - DNA, 23 bp, Homo sapiens
aaaatttttatattacagaatat

SEQ ID NO: 1776 - DNA, 23 bp, Homo sapiens
ttgtagactatcttttatattct

SEQ ID NO: 1777 - DNA, 23 bp, Homo sapiens
ttttgcattttagatgaaagaga

SEQ ID NO: 1778 - DNA, 23 bp, Homo sapiens
aacatcttctctttcatctaaaa

SEQ ID NO: 1779 - DNA, 23 bp, Homo sapiens
ttttgaacatcttctctttcatc

SEQ ID NO: 1780 - DNA, 23 bp, Homo sapiens
caaaaacccaaaatattttagct

SEQ ID NO: 1781 - DNA, 23 bp, Homo sapiens
gcttgtgtttctaatttttcttt

SEQ ID NO: 1782 - DNA, 23 bp, Homo sapiens
acttattgttattgaaattggct

SEQ ID NO: 1783 - DNA, 23 bp, Homo sapiens
taccatgtattgctaaacaaagt

SEQ ID NO: 1784 - DNA, 23 bp, Homo sapiens
gtatcaattcacaccagcaagtt

SEQ ID NO: 1785 - DNA, 23 bp, Homo sapiens
ctcctctgtaaagtggcgattat

SEQ ID NO: 1786 - DNA, 23 bp, Homo sapiens
tttaaaatgaagattttccacca

SEQ ID NO: 1787 - DNA, 23 bp, Homo sapiens
aaatgaagattttccaccaatca

SEQ ID NO: 1788 - DNA, 23 bp, Homo sapiens
ccaccaatcactttactctccta

SEQ ID NO: 1789 - DNA, 23 bp, Homo sapiens
ccaccagttcttaggcaactgtt

SEQ ID NO: 1790 - DNA, 23 bp, Homo sapiens
cattaatttatatccttgattat

SEQ ID NO: 1791 - DNA, 23 bp, Homo sapiens
gttgttgttgttaaggtcaaagt

SEQ ID NO: 1792 - DNA, 23 bp, Homo sapiens
aaattaccctagatcttaaagtt

SEQ ID NO: 1793 - DNA, 24 bp, Homo sapiens
gcctctgattagggtgggggcgtg

SEQ ID NO: 1794 - DNA, 24 bp, Homo sapiens
tcacaggctccaggaagggtttgg

SEQ ID NO: 1795 - DNA, 24 bp, Homo sapiens
cccaggggggcctctttcggaagg

SEQ ID NO: 1796 - DNA, 24 bp, Homo sapiens
ggaaggctctcttggtgatggaga

SEQ ID NO: 1797 - DNA, 24 bp, Homo sapiens
aagctagtctagtgcaagctaaca

SEQ ID NO: 1798 - DNA, 24 bp, Homo sapiens
ctggcctatgttattacctgtatg

SEQ ID NO: 1799 - DNA, 24 bp, Homo sapiens
tggcctatgttattacctgtatgg

SEQ ID NO: 1800 - DNA, 23 bp, Homo sapiens
ttccattctaatgggtggctgtt

SEQ ID NO: 1801 - DNA, 20 bp, Homo sapiens
ctcctctgtaaagtggcgat

SEQ ID NO: 1802 - DNA, 20 bp, Homo sapiens
ttccattctaatgggtggct

SEQ ID NO: 1803 - DNA, 20 bp, Homo sapiens
gtatcaattcacaccagcaa

SEQ ID NO: 1804 - DNA, 20 bp, Homo sapiens
taccatgtattgctaaacaa

SEQ ID NO: 1805 - DNA, 20 bp, Homo sapiens
acttattgttattgaaattg

SEQ ID NO: 1806 - DNA, 20 bp, Homo sapiens
gcttgtgtttctaatttttc

SEQ ID NO: 1807 - DNA, 20 bp, Homo sapiens
caaaaacccaaaatatttta

SEQ ID NO: 1808 - DNA, 20 bp, Homo sapiens
tttaaaatgaagattttcca

SEQ ID NO: 1809 - DNA, 20 bp, Homo sapiens
aaatgaagattttccaccaa

SEQ ID NO: 1810 - DNA, 20 bp, Homo sapiens
ccaccaatcactttactctc

SEQ ID NO: 1811 - DNA, 20 bp, Homo sapiens
ccaccagttcttaggcaact

SEQ ID NO: 1812 - DNA, 20 bp, Homo sapiens
cattaatttatatccttgat

SEQ ID NO: 1813 - DNA, 20 bp, Homo sapiens
agttatagctctctttcaat

SEQ ID NO: 1814 - DNA, 20 bp, Homo sapiens
atgtataacaattccaacat

SEQ ID NO: 1815 - DNA, 20 bp, Homo sapiens
aaattaccctagatcttaaa

SEQ ID NO: 1816 - DNA, 20 bp, Homo sapiens
gttgttgttgttaaggtcaa

SEQ ID NO: 1817 - DNA, 20 bp, Homo sapiens
gcttgtgtttctaatttttc

SEQ ID NO: 1818 - DNA, 20 bp, Homo sapiens
taatttttctttttcttctt

SEQ ID NO: 1819 - DNA, 20 bp, Homo sapiens
gcaaaaaggaaaaaagaaga

SEQ ID NO: 1820 - DNA, 20 bp, Homo sapiens
gggtttttgcaaaaaggaaa

SEQ ID NO: 1821 - DNA, 20 bp, Homo sapiens
agctcctactcagactgtta

SEQ ID NO: 1822 - DNA, 20 bp, Homo sapiens
tgcaaaaacccaaaatattt

SEQ ID NO: 1823 - DNA, 20 bp, Homo sapiens
tgtcaccagagtaacagtct

SEQ ID NO: 1824 - DNA, 20 bp, Homo sapiens
cttagtaaccacaggttgtg

SEQ ID NO: 1825 - DNA, 20 bp, Homo sapiens
tagtttggagatggcagttt

SEQ ID NO: 1826 - DNA, 20 bp, Homo sapiens
gagatggcagtttccttagt

SEQ ID NO: 1827 - DNA, 20 bp, Homo sapiens
cttgatgttggaggtacctg

SEQ ID NO: 1828 - DNA, 20 bp, Homo sapiens
atgttggaggtacctgctct

SEQ ID NO: 1829 - DNA, 20 bp, Homo sapiens
taacttgatcaagcagagaa

SEQ ID NO: 1830 - DNA, 20 bp, Homo sapiens
tctgcttgatcaagttataa

SEQ ID NO: 1831 - DNA, 20 bp, Homo sapiens
taaaatcacagagggtgatg

SEQ ID NO: 1832 - DNA, 20 bp, Homo sapiens
atatcctcaaggtcacccac

SEQ ID NO: 1833 - DNA, 20 bp, Homo sapiens
atgatcatctcgttgatatc

SEQ ID NO: 1834 - DNA, 20 bp, Homo sapiens
tcataccttctgcttgatga

SEQ ID NO: 1835 - DNA, 20 bp, Homo sapiens
tcattttttctcataccttc

SEQ ID NO: 1836 - DNA, 20 bp, Homo sapiens
tgccaacttttatcattttt

SEQ ID NO: 1837 - DNA, 20 bp, Homo sapiens
aatcagaaagaagatcttat

SEQ ID NO: 1838 - DNA, 20 bp, Homo sapiens
atttccctagggtccagctt

SEQ ID NO: 1839 - DNA, 20 bp, Homo sapiens
gctcaaattgttactcttca

SEQ ID NO: 1840 - DNA, 20 bp, Homo sapiens
agctcctactcagactgtta

SEQ ID NO: 1841 - DNA, 20 bp, Homo sapiens
attctagtactatgcatctt

SEQ ID NO: 1842 - DNA, 20 bp, Homo sapiens
acttaagttacttgtccagg

SEQ ID NO: 1843 - DNA, 20 bp, Homo sapiens
ccaaggtcccagagttccta

SEQ ID NO: 1844 - DNA, 20 bp, Homo sapiens
tttccctggcaaggtctgaa

SEQ ID NO: 1845 - DNA, 20 bp, Homo sapiens
gctcattctcatgcctggac

SEQ ID NO: 1846 - DNA, 20 bp, Homo sapiens
tttagcaatacatggtagaa

SEQ ID NO: 1847 - DNA, 20 bp, Homo sapiens
agccaaactcttattcatga

SEQ ID NO: 1848 - DNA, 20 bp, Homo sapiens
taacaatgtggatactttgt

SEQ ID NO: 1849 - RNA, 21 nt, Homo sapiens
guguuauuacuugcuacugca

SEQ ID NO: 1850 - RNA, 21 nt, Homo sapiens
guguauugcuuguacuacuca

SEQ ID NO: 1851 - RNA, 21 nt, Homo sapiens
guuuaaauguaaauagcucag

SEQ ID NO: 1852 - RNA, 22 nt, Homo sapiens
gaauuuucaaugauguucuggg

SEQ ID NO: 1853 - RNA, 22 nt, Homo sapiens
gaacuggugggaaauggucuag

SEQ ID NO: 1854 - RNA, 22 nt, Homo sapiens
guuucauuggcuuugauuuccc

SEQ ID NO: 1855 - RNA, 21 nt, Homo sapiens
ggcaauucuccugaauagaaa

SEQ ID NO: 1856 - RNA, 22 nt, Homo sapiens
gauuauacuuaggcugaauagu

SEQ ID NO: 1857 - RNA, 21 nt, Homo sapiens
gacuuccagaauuauguguuc

SEQ ID NO: 1858 - RNA, 21 nt, Homo sapiens
gugagggccugacacauggua

SEQ ID NO: 1859 - RNA, 21 nt, Homo sapiens
gugaagaucauuucuugguag

SEQ ID NO: 1860 - RNA, 21 nt, Homo sapiens
gcacagucagaacuagugugc

SEQ ID NO: 1861 - RNA, 21 nt, Homo sapiens
gaguaagcccgaucauuauug

SEQ ID NO: 1862 - RNA, 21 nt, Homo sapiens
ggaagggacauauucuauggg

SEQ ID NO: 1863 - RNA, 21 nt, Homo sapiens
gaccacaagcugacuuggggg

SEQ ID NO: 1864 - RNA, 21 nt, Homo sapiens
ggauuuguauccauuaucugg

SEQ ID NO: 1865 - RNA, 20 nt, Homo sapiens
cucugcauuguuuuggccuc

SEQ ID NO: 1866 - RNA, 20 nt, Homo sapiens
uccuccaaagaguagaaugg

SEQ ID NO: 1867 - RNA, 20 nt, Homo sapiens
gcccuaaacuuacacuguuc

SEQ ID NO: 1868 - RNA, 20 nt, Homo sapiens
aaagauagauuagauugucc

SEQ ID NO: 1869 - RNA, 20 nt, Homo sapiens
guugcuaaauuacauaguuu

SEQ ID NO: 1870 - RNA, 20 nt, Homo sapiens
uguugcaauagucaaucaag

SEQ ID NO: 1871 - RNA, 20 nt, Homo sapiens
auacugauuaagacagauga

SEQ ID NO: 1872 - RNA, 20 nt, Homo sapiens
aauacugauuaagacagaug

SEQ ID NO: 1873 - RNA, 20 nt, Homo sapiens
cucuauacaaaugccaacgc

SEQ ID NO: 1874 - RNA, 20 nt, Homo sapiens
acuugcaugcacaccagcgu

SEQ ID NO: 1875 - RNA, 20 nt, Homo sapiens
uugggcuaauguagcauaau

SEQ ID NO: 1876 - RNA, 20 nt, Homo sapiens
gcguuggcauuuguauagag

SEQ ID NO: 1877 - RNA, 19 nt, Homo sapiens
ugggcuaaguagcauaaug

SEQ ID NO: 1878 - RNA, 20 nt, Homo sapiens
uuugggcuaauguagcauaa

SEQ ID NO: 1879 - RNA, 20 nt, Homo sapiens
gcuuaacuccuuaauauuaa

SEQ ID NO: 1880 - RNA, 20 nt, Homo sapiens
ucuucuauauuaaagcagau

SEQ ID NO: 1881 - RNA, 20 nt, Homo sapiens
cuucuauauuaaagcagauu

SEQ ID NO: 1882 - RNA, 20 nt, Homo sapiens
aauauauaacuaccuugggu

SEQ ID NO: 1883 - RNA, 20 nt, Homo sapiens
accuccauucuacucuuugg

SEQ ID NO: 1884 - RNA, 20 nt, Homo sapiens
uuucaaugauauccaaccca

SEQ ID NO: 1885 - RNA, 20 nt, Homo sapiens
aguaccuccauucuacucuu

SEQ ID NO: 1886 - RNA, 20 nt, Homo sapiens
cuauccuccaaagaguagaa

SEQ ID NO: 1887 - RNA, 20 nt, Homo sapiens
uuuugcuacauauuucaggc

SEQ ID NO: 1888 - RNA, 20 nt, Homo sapiens
uuugcuacauauuucaggcu

SEQ ID NO: 1889 - RNA, 20 nt, Homo sapiens
ggguuggauaucauugaaaa

SEQ ID NO: 1890 - RNA, 19 nt, Homo sapiens
auauuucaggcuggguucu

SEQ ID NO: 1891 - RNA, 20 nt, Homo sapiens
uugaaauauauaacuaccuu

SEQ ID NO: 1892 - RNA, 20 nt, Homo sapiens
auugaaauauauaacuaccu

SEQ ID NO: 1893 - RNA, 20 nt, Homo sapiens
gugaguaguggggcacuuua

SEQ ID NO: 1894 - RNA, 20 nt, Homo sapiens
uguauguagaagguuaacua

SEQ ID NO: 1895 - RNA, 20 nt, Homo sapiens
gagccuaauaaauguacaau

SEQ ID NO: 1896 - RNA, 20 nt, Homo sapiens
uuguauguagaagguuaacu

SEQ ID NO: 1897 - RNA, 19 nt, Homo sapiens
caauuuguuuugaguaacu

SEQ ID NO: 1898 - RNA, 20 nt, Homo sapiens
ugccuucugaaauaguccag

SEQ ID NO: 1899 - RNA, 20 nt, Homo sapiens
guuaauagggaaacagcaua

SEQ ID NO: 1900 - RNA, 20 nt, Homo sapiens
aacaaugcagaguuaauugu

SEQ ID NO: 1901 - RNA, 20 nt, Homo sapiens
gaacauguugaguagacaca

SEQ ID NO: 1902 - RNA, 20 nt, Homo sapiens
uuuaucaucugugucuauuc

SEQ ID NO: 1903 - RNA, 20 nt, Homo sapiens
ucuuuacuuucuugacuaua

SEQ ID NO: 1904 - RNA, 20 nt, Homo sapiens
aauauucucaaaccucguuc

SEQ ID NO: 1905 - RNA, 20 nt, Homo sapiens
auuaacuguguuccagaacg

SEQ ID NO: 1906 - RNA, 20 nt, Homo sapiens
uaacugcuucuuuggaugac

SEQ ID NO: 1907 - RNA, 20 nt, Homo sapiens
gaccagaacaguguaaguuu

SEQ ID NO: 1908 - RNA, 20 nt, Homo sapiens
accagaacaguguaaguuua

SEQ ID NO: 1909 - RNA, 20 nt, Homo sapiens
cuacuuuuuccccacuacug

SEQ ID NO: 1910 - RNA, 20 nt, Homo sapiens
uggaacacaguuaauucacu

SEQ ID NO: 1911 - RNA, 20 nt, Homo sapiens
guguuguuuaacugcuucuu

SEQ ID NO: 1912 - RNA, 20 nt, Homo sapiens
aacugucaguugcauauucc

SEQ ID NO: 1913 - RNA, 20 nt, Homo sapiens
cagaaaggaaugcugguacc

SEQ ID NO: 1914 - RNA, 20 nt, Homo sapiens
ucugccuacacaaugaaugg

SEQ ID NO: 1915 - RNA, 20 nt, Homo sapiens
cacagaucaauccaauuguu

SEQ ID NO: 1916 - RNA, 20 nt, Homo sapiens
uugacagguggaaaguacau

SEQ ID NO: 1917 - RNA, 20 nt, Homo sapiens
acauuuuuaggcuugacagg

SEQ ID NO: 1918 - RNA, 20 nt, Homo sapiens
cucucccaugacagacuccc

SEQ ID NO: 1919 - RNA, 20 nt, Homo sapiens
uugguaagaguuaugauaag

SEQ ID NO: 1920 - RNA, 20 nt, Homo sapiens
aacacaaauuaaguucaccu

SEQ ID NO: 1921 - RNA, 20 nt, Homo sapiens
aggaucagugcuguagugcc

SEQ ID NO: 1922 - RNA, 20 nt, Homo sapiens
ggccguuuauuauuauugac

SEQ ID NO: 1923 - RNA, 20 nt, Homo sapiens
ucucaggauugcuaugcaac

SEQ ID NO: 1924 - RNA, 20 nt, Homo sapiens
caggaagacauaccauguaa

SEQ ID NO: 1925 - RNA, 20 nt, Homo sapiens
agcagggcucuuucaguuuc

SEQ ID NO: 1926 - RNA, 20 nt, Homo sapiens
uaacauuuucagcuugaacc

SEQ ID NO: 1927 - RNA, 20 nt, Homo sapiens
ucaagcugaaaauguuacac

SEQ ID NO: 1928 - RNA, 20 nt, Homo sapiens
guaacauuuucagcuugaac

SEQ ID NO: 1929 - RNA, 20 nt, Homo sapiens
cagaaugaauuuuggagcac

SEQ ID NO: 1930 - RNA, 20 nt, Homo sapiens
uuuauuauuauugacuggug

SEQ ID NO: 1931 - RNA, 20 nt, Homo sapiens
agaagaaucugaccuuuaca

SEQ ID NO: 1932 - RNA, 20 nt, Homo sapiens
gcagggcucuuucaguuucu

SEQ ID NO: 1933 - RNA, 20 nt, Homo sapiens
cuaaacaguagccaggcgug

SEQ ID NO: 1934 - RNA, 20 nt, Homo sapiens
cgccuggcuacuguuuagug

SEQ ID NO: 1935 - RNA, 20 nt, Homo sapiens
cuccgcacuaaacaguagcc

SEQ ID NO: 1936 - RNA, 20 nt, Homo sapiens
guagccaggcguguggaugu

SEQ ID NO: 1937 - RNA, 20 nt, Homo sapiens
cuuggcuuugacuauucugc

SEQ ID NO: 1938 - RNA, 20 nt, Homo sapiens
aguagccaggcguguggaug

SEQ ID NO: 1939 - RNA, 20 nt, Homo sapiens
uccucccacauccacacgcc

SEQ ID NO: 1940 - RNA, 20 nt, Homo sapiens
uuggcuuugacuauucugcu

SEQ ID NO: 1941 - RNA, 20 nt, Homo sapiens
auaaugucucuggcuuguaa

SEQ ID NO: 1942 - RNA, 20 nt, Homo sapiens
ugguacccggcagcucucug

SEQ ID NO: 1943 - RNA, 20 nt, Homo sapiens
gugggaggaaccucaaagag

SEQ ID NO: 1944 - RNA, 20 nt, Homo sapiens
ugacuauucugcugggaaca

SEQ ID NO: 1945 - RNA, 20 nt, Homo sapiens
cucucugaggaauguucccu

SEQ ID NO: 1946 - RNA, 20 nt, Homo sapiens
aacauuccucagagagcugc

SEQ ID NO: 1947 - RNA, 20 nt, Homo sapiens
auucugaagcuccaaacaau

SEQ ID NO: 1948 - RNA, 20 nt, Homo sapiens
uaaauuacucugcuaaagua

SEQ ID NO: 1949 - RNA, 20 nt, Homo sapiens
aguacaaaccagguuuguac

SEQ ID NO: 1950 - RNA, 20 nt, Homo sapiens
auauccuuccaguacaaacc

SEQ ID NO: 1951 - RNA, 20 nt, Homo sapiens
caaaccagguuuguacugga

SEQ ID NO: 1952 - RNA, 20 nt, Homo sapiens
ggcagcuaaagcaucacuga

SEQ ID NO: 1953 - RNA, 20 nt, Homo sapiens
aucucugaguaguacaaacc

SEQ ID NO: 1954 - RNA, 20 nt, Homo sapiens
gugucccauucucuuugacu

SEQ ID NO: 1955 - RNA, 20 nt, Homo sapiens
ugugucccauucucuuugac

SEQ ID NO: 1956 - RNA, 20 nt, Homo sapiens
uucugaauguugaacaagua

SEQ ID NO: 1957 - RNA, 20 nt, Homo sapiens
gucucccagucaaagagaau

SEQ ID NO: 1958 - RNA, 20 nt, Homo sapiens
auucucuuugacugggagac

SEQ ID NO: 1959 - RNA, 20 nt, Homo sapiens
ucuuugacugggagacaggc

SEQ ID NO: 1960 - RNA, 20 nt, Homo sapiens
gugguguccuuugaauaugc

SEQ ID NO: 1961 - RNA, 20 nt, Homo sapiens
agauuguccaggauauaauu

SEQ ID NO: 1962 - RNA, 20 nt, Homo sapiens
uuagcaaccaaauuauaucc

SEQ ID NO: 1963 - RNA, 20 nt, Homo sapiens
guugaaauuaaacuacacac

SEQ ID NO: 1964 - RNA, 20 nt, Homo sapiens
aucuuuaccugcauauucaa

SEQ ID NO: 1965 - RNA, 17 nt, Homo sapiens
guguccuuugaauaugc

SEQ ID NO: 1966 - RNA, 17 nt, Homo sapiens
uuguccaggauauaauu

SEQ ID NO: 1967 - RNA, 17 nt, Homo sapiens
gcaaccaaauuauaucc

SEQ ID NO: 1968 - RNA, 17 nt, Homo sapiens
gaaauuaaacuacacac

SEQ ID NO: 1969 - RNA, 17 nt, Homo sapiens
uuuaccugcauauucaa

SEQ ID NO: 1970 - RNA, 20 nt, Homo sapiens
uacacauuuuuaggcuugac

SEQ ID NO: 1971 - RNA, 20 nt, Homo sapiens
cauuccugggagucugucau

SEQ ID NO: 1972 - RNA, 20 nt, Homo sapiens
uguaugaugcuauaauacca

SEQ ID NO: 1973 - RNA, 20 nt, Homo sapiens
guggaaaguacauaggaccu

SEQ ID NO: 1974 - RNA, 20 nt, Homo sapiens
ucuuaucauaacucuuacca

SEQ ID NO: 1975 - RNA, 17 nt, Homo sapiens
acauuuuuaggcuugac

SEQ ID NO: 1976 - RNA, 17 nt, Homo sapiens
uccugggagucugucau

SEQ ID NO: 1977 - RNA, 17 nt, Homo sapiens
augaugcuauaauacca

SEQ ID NO: 1978 - RNA, 17 nt, Homo sapiens
gaaaguacauaggaccu

SEQ ID NO: 1979 - RNA, 17 nt, Homo sapiens
uaucauaacucuuacca

SEQ ID NO: 1980 - DNA, 24 bp, Homo sapiens
gagttcctactcagactgttactc

SEQ ID NO: 1981 - DNA, 26 bp, Homo sapiens
gtgagttcctactcagactgttactc

SEQ ID NO: 1982 - DNA, 28 bp, Homo sapiens
gtctgagttcctactcagactgttactc

SEQ ID NO: 1983 - DNA, 22 bp, Homo sapiens
aaagatatataatgtcatgaat

SEQ ID NO: 1984 - DNA, 22 bp, Homo sapiens
gcagaatcaaatataatagtct

SEQ ID NO: 1985 - DNA, 20 bp, Homo sapiens
aacaaatatcccttagtatc

SEQ ID NO: 1986 - DNA, 20 bp, Homo sapiens
aatgtatttcttctattcaa

SEQ ID NO: 1987 - DNA, 22 bp, Homo sapiens
aacaataagtcaaatttaattg

SEQ ID NO: 1988 - DNA, 22 bp, Homo sapiens
gaactggtgggaaatggtctag

SEQ ID NO: 1989 - DNA, 22 bp, Homo sapiens
tcctttggtaaataaaagtcct

SEQ ID NO: 1990 - DNA, 22 bp, Homo sapiens
taggaatcaaatggacttggat

SEQ ID NO: 1991 - DNA, 22 bp, Homo sapiens
taattctttctagaaagagcct

SEQ ID NO: 1992 - DNA, 22 bp, Homo sapiens
ctcttgcatcttgcacatgtcc

SEQ ID NO: 1993 - DNA, 22 bp, Homo sapiens
acttagaggtcttctacataca

SEQ ID NO: 1994 - DNA, 22 bp, Homo sapiens
tcagaggtgagtggtgagggga

SEQ ID NO: 1995 - DNA, 22 bp, Homo sapiens
acacacagctgggttatcagag

SEQ ID NO: 1996 - DNA, 19 bp, Homo sapiens
cacagctgggttatcagag

SEQ ID NO: 1997 - DNA, 20 bp, Homo sapiens
acacagctgggttatcagag

SEQ ID NO: 1998 - DNA, 21 bp, Homo sapiens
cacacagctgggttatcagag

SEQ ID NO: 1999 - DNA, 23 bp, Homo sapiens
aacacacagctgggttatcagag

SEQ ID NO: 2000 - DNA, 19 bp, Homo sapiens
ctgstgggaratggtctag

SEQ ID NO: 2001 - DNA, 20 bp, Homo sapiens
actggtgggaaatggtctag

SEQ ID NO: 2002 - DNA, 21 bp, Homo sapiens
aactggtgggaaatggtctag

SEQ ID NO: 2003 - DNA, 23 bp, Homo sapiens
agaactggtgggaaatggtctag

SEQ ID NO: 2004 - DNA, 20 bp, Homo sapiens
atatcttcttaaatacccga

SEQ ID NO: 2005 - DNA, 20 bp, Homo sapiens
agtctcacaaaactgcagag

SEQ ID NO: 2006 - DNA, 20 bp, Homo sapiens
tacttatgtattttaaaaac

SEQ ID NO: 2007 - DNA, 22 bp, Homo sapiens
gaataatttctattatattaca

SEQ ID NO: 2008 - DNA, 22 bp, Homo sapiens
ttcgaaaatttcaggtaagccg

SEQ ID NO: 2009 - DNA, 22 bp, Homo sapiens
tcatttctaaaagtcttttgcc

SEQ ID NO: 2010 - DNA, 22 bp, Homo sapiens
tttgagacacagtataggttat

SEQ ID NO: 2011 - DNA, 20 bp, Homo sapiens
atataatagaaattattcat

SEQ ID NO: 2012 - DNA, 20 bp, Homo sapiens
taatatgccctgtaatataa

SEQ ID NO: 2013 - DNA, 20 bp, Homo sapiens
tgatatcatcaatatctttg

SEQ ID NO: 2014 - DNA, 20 bp, Homo sapiens
gcaattaattggaaaatgtg

SEQ ID NO: 2015 - DNA, 21 bp, Homo sapiens
ctttaagcttaggtaaaatca

SEQ ID NO: 2016 - DNA, 20 bp, Homo sapiens
cagtaatgtgtcataccttc

SEQ ID NO: 2017 - DNA, 20 bp, Homo sapiens
cagggcatattatatttaga

SEQ ID NO: 2018 - DNA, 20 bp, Homo sapiens
caaaagccaaatctatttca

SEQ ID NO: 2019 - DNA, 26 bp, Homo sapiens
atgctttggtgggaagaagtagagga

SEQ ID NO: 2020 - DNA, 26 bp, Homo sapiens
atgctttggtgggaagaatagaggac

SEQ ID NO: 2021 - DNA, 23 bp, Homo sapiens
ttgtgacaagctcactaattagg

SEQ ID NO: 2022 - DNA, 23 bp, Homo sapiens
aagtttgaagaacttttaccagg

SEQ ID NO: 2023 - DNA, 23 bp, Homo sapiens
aggcagcgataaaaaaaacctgg

SEQ ID NO: 2024 - DNA, 23 bp, Homo sapiens
gctttggtgggaagaagtagagg

SEQ ID NO: 2025 - DNA, 24 bp, Homo sapiens
tctttttcttcttttttccttttt

SEQ ID NO: 2026 - DNA, 24 bp, Homo sapiens
ctttttcttcttttttcctttttg

SEQ ID NO: 2027 - DNA, 24 bp, Homo sapiens
tttttcttcttttttcctttttgc

SEQ ID NO: 2028 - DNA, 24 bp, Homo sapiens
tcttcttttttcctttttgcaaaa

SEQ ID NO: 2029 - DNA, 24 bp, Homo sapiens
cttcttttttcctttttgcaaaaa

SEQ ID NO: 2030 - DNA, 24 bp, Homo sapiens
ttcttttttcctttttgcaaaaac

SEQ ID NO: 2031 - DNA, 24 bp, Homo sapiens
ttcctttttgcaaaaacccaaaat

SEQ ID NO: 2032 - DNA, 24 bp, Homo sapiens
tcctttttgcaaaaacccaaaata

SEQ ID NO: 2033 - DNA, 24 bp, Homo sapiens
cctttttgcaaaaacccaaaatat

SEQ ID NO: 2034 - DNA, 24 bp, Homo sapiens
ctttttgcaaaaacccaaaatatt

SEQ ID NO: 2035 - DNA, 24 bp, Homo sapiens
tgcaaaaacccaaaatattttagc

SEQ ID NO: 2036 - DNA, 24 bp, Homo sapiens
gcaaaaacccaaaatattttagct

SEQ ID NO: 2037 - DNA, 24 bp, Homo sapiens
caaaaacccaaaatattttagctc

SEQ ID NO: 2038 - DNA, 24 bp, Homo sapiens
agctcctactcagactgttactct

SEQ ID NO: 2039 - DNA, 24 bp, Homo sapiens
gctcctactcagactgttactctg

SEQ ID NO: 2040 - DNA, 24 bp, Homo sapiens
cttagtaaccacaggttgtgtcac

SEQ ID NO: 2041 - DNA, 24 bp, Homo sapiens
gagatggcagtttccttagtaacc

SEQ ID NO: 2042 - DNA, 24 bp, Homo sapiens
tagtttggagatggcagtttcctt

SEQ ID NO: 2043 - DNA, 24 bp, Homo sapiens
ttctcataccttctgcttgatgat

SEQ ID NO: 2044 - DNA, 24 bp, Homo sapiens
tcattttttctcataccttctgct

SEQ ID NO: 2045 - DNA, 24 bp, Homo sapiens
atcattttttctcataccttctgc

SEQ ID NO: 2046 - DNA, 24 bp, Homo sapiens
aagaaaaacttctgccaactttta

SEQ ID NO: 2047 - DNA, 24 bp, Homo sapiens
aaagaaaaacttctgccaactttt

SEQ ID NO: 2048 - DNA, 24 bp, Homo sapiens
tctttaaaatgaagattttccacc

SEQ ID NO: 2049 - DNA, 24 bp, Homo sapiens
ctttaaaatgaagattttccacca

SEQ ID NO: 2050 - DNA, 24 bp, Homo sapiens
tttaaaatgaagattttccaccaa

SEQ ID NO: 2051 - DNA, 24 bp, Homo sapiens
aaatgaagattttccaccaatcac

SEQ ID NO: 2052 - DNA, 24 bp, Homo sapiens
ccaccaatcactttactctcctag

SEQ ID NO: 2053 - DNA, 24 bp, Homo sapiens
caccaatcactttactctcctaga

SEQ ID NO: 2054 - DNA, 24 bp, Homo sapiens
ctctcctagaccatttcccaccag

SEQ ID NO: 2055 - DNA, 24 bp, Homo sapiens
agaaaagattaaacagtgtgctac

SEQ ID NO: 2056 - DNA, 24 bp, Homo sapiens
tttgagaaaagattaaacagtgtg

SEQ ID NO: 2057 - DNA, 24 bp, Homo sapiens
atttgagaaaagattaaacagtgt

SEQ ID NO: 2058 - DNA, 24 bp, Homo sapiens
tatttgagaaaagattaaacagtg

SEQ ID NO: 2059 - DNA, 24 bp, Homo sapiens
atcttttctcaaataaaaagacat

SEQ ID NO: 2060 - DNA, 24 bp, Homo sapiens
ctcaaataaaaagacatggggctt

SEQ ID NO: 2061 - DNA, 24 bp, Homo sapiens
tcaaataaaaagacatggggcttc

SEQ ID NO: 2062 - DNA, 24 bp, Homo sapiens
tgttttgcctttttggtatcttac

SEQ ID NO: 2063 - DNA, 24 bp, Homo sapiens
gttttgcctttttggtatcttaca

SEQ ID NO: 2064 - DNA, 24 bp, Homo sapiens
ttttgcctttttggtatcttacag

SEQ ID NO: 2065 - DNA, 24 bp, Homo sapiens
gcctttttggtatcttacaggaac

SEQ ID NO: 2066 - DNA, 24 bp, Homo sapiens
cctttttggtatcttacaggaact

SEQ ID NO: 2067 - DNA, 24 bp, Homo sapiens
tggtatcttacaggaactccagga

SEQ ID NO: 2068 - DNA, 24 bp, Homo sapiens
ggtatcttacaggaactccaggat

SEQ ID NO: 2069 - DNA, 24 bp, Homo sapiens
aggattgctgaattatttcttccc

SEQ ID NO: 2070 - DNA, 24 bp, Homo sapiens
gaggattgctgaattatttcttcc

SEQ ID NO: 2071 - DNA, 24 bp, Homo sapiens
tgaggattgctgaattatttcttc

SEQ ID NO: 2072 - DNA, 24 bp, Homo sapiens
ctgtagaatactggcatctgtttt

SEQ ID NO: 2073 - DNA, 24 bp, Homo sapiens
cctgtagaatactggcatctgttt

SEQ ID NO: 2074 - DNA, 24 bp, Homo sapiens
tcctgtagaatactggcatctgtt

SEQ ID NO: 2075 - DNA, 24 bp, Homo sapiens
cagacctcctgccaccgcagattc

SEQ ID NO: 2076 - DNA, 24 bp, Homo sapiens
tgtctgacagctgtttgcagacct

SEQ ID NO: 2077 - DNA, 24 bp, Homo sapiens
ctgtctgacagctgtttgcagacc

SEQ ID NO: 2078 - DNA, 24 bp, Homo sapiens
tctgtctgacagctgtttgcagac

SEQ ID NO: 2079 - DNA, 24 bp, Homo sapiens
ttctgtctgacagctgtttgcaga

SEQ ID NO: 2080 - DNA, 24 bp, Homo sapiens
attcctattagatctgtcgcccta

SEQ ID NO: 2081 - DNA, 24 bp, Homo sapiens
cattcctattagatctgtcgccct

SEQ ID NO: 2082 - DNA, 24 bp, Homo sapiens
agcagactttttaagctttcttta

SEQ ID NO: 2083 - DNA, 24 bp, Homo sapiens
gcagactttttaagctttctttag

SEQ ID NO: 2084 - DNA, 24 bp, Homo sapiens
taagctttctttagaagaatattt

SEQ ID NO: 2085 - DNA, 24 bp, Homo sapiens
aagctttctttagaagaatatttc

SEQ ID NO: 2086 - DNA, 24 bp, Homo sapiens
agctttctttagaagaatatttca

SEQ ID NO: 2087 - DNA, 24 bp, Homo sapiens
tttagaagaatatttcatgagaga

SEQ ID NO: 2088 - DNA, 24 bp, Homo sapiens
gaagaatatttcatgagagattat

SEQ ID NO: 2089 - DNA, 24 bp, Homo sapiens
tcagtataaccaaaaaatatacgc

SEQ ID NO: 2090 - DNA, 24 bp, Homo sapiens
acataatccatctatttttcttga

SEQ ID NO: 2091 - DNA, 24 bp, Homo sapiens
cataatccatctatttttcttgat

SEQ ID NO: 2092 - DNA, 24 bp, Homo sapiens
tcttgatccatatgcttttacctg

SEQ ID NO: 2093 - DNA, 24 bp, Homo sapiens
cttgatccatatgcttttacctgc

SEQ ID NO: 2094 - DNA, 24 bp, Homo sapiens
ttgatccatatgcttttacctgca

SEQ ID NO: 2095 - DNA, 24 bp, Homo sapiens
tcaacagatctgtcaaatcgcctg

SEQ ID NO: 2096 - DNA, 24 bp, Homo sapiens
acctgcaggcgatttgacagatct

SEQ ID NO: 2097 - DNA, 24 bp, Homo sapiens
cctgcaggcgatttgacagatctg

SEQ ID NO: 2098 - DNA, 24 bp, Homo sapiens
acagatctgttgagaaatggcggc

SEQ ID NO: 2099 - DNA, 24 bp, Homo sapiens
tatcataatgaaaacgccgccatt

SEQ ID NO: 2100 - DNA, 24 bp, Homo sapiens
cattatgatataaagatatttaat

SEQ ID NO: 2101 - DNA, 24 bp, Homo sapiens
tatttagcatgttcccaattctca

SEQ ID NO: 2102 - DNA, 24 bp, Homo sapiens
gaaaaaacaaatcaaagacttacc

SEQ ID NO: 2103 - DNA, 24 bp, Homo sapiens
atttgttttttcgaaattgtattt

SEQ ID NO: 2104 - DNA, 24 bp, Homo sapiens
ttttttcgaaattgtatttatctt

SEQ ID NO: 2105 - DNA, 24 bp, Homo sapiens
ttcgaaattgtatttatcttcagc

SEQ ID NO: 2106 - DNA, 24 bp, Homo sapiens
tcgaaattgtatttatcttcagca

SEQ ID NO: 2107 - DNA, 24 bp, Homo sapiens
cgaaattgtatttatcttcagcac

SEQ ID NO: 2108 - DNA, 24 bp, Homo sapiens
gaaattgtatttatcttcagcaca

SEQ ID NO: 2109 - DNA, 24 bp, Homo sapiens
agaagttaaagagtccagatgtgc

SEQ ID NO: 2110 - DNA, 24 bp, Homo sapiens
tcttcagcacatctggactcttta

SEQ ID NO: 2111 - DNA, 24 bp, Homo sapiens
catcacccttcagaacctgatctt

SEQ ID NO: 2112 - DNA, 24 bp, Homo sapiens
acttcttaaagatcaggttctgaa

SEQ ID NO: 2113 - DNA, 24 bp, Homo sapiens
gactgttgttgtcatcattatatt

SEQ ID NO: 2114 - DNA, 24 bp, Homo sapiens
actgttgttgtcatcattatatta

SEQ ID NO: 2115 - DNA, 24 bp, Homo sapiens
aactagaataaaaggaaaaataaa

SEQ ID NO: 2116 - DNA, 24 bp, Homo sapiens
ctactatatatttatttttccttt

SEQ ID NO: 2117 - DNA, 24 bp, Homo sapiens
tttttccttttattctagttgaaa

SEQ ID NO: 2118 - DNA, 24 bp, Homo sapiens
tccttttattctagttgaaagaat

SEQ ID NO: 2119 - DNA, 24 bp, Homo sapiens
ccttttattctagttgaaagaatt

SEQ ID NO: 2120 - DNA, 24 bp, Homo sapiens
cttttattctagttgaaagaattc

SEQ ID NO: 2121 - DNA, 24 bp, Homo sapiens
attctagttgaaagaattcagaat

SEQ ID NO: 2122 - DNA, 24 bp, Homo sapiens
ttctagttgaaagaattcagaatc

SEQ ID NO: 2123 - DNA, 24 bp, Homo sapiens
attcaactgttgcctccggttctg

SEQ ID NO: 2124 - DNA, 24 bp, Homo sapiens
acatttcattcaactgttgcctcc

SEQ ID NO: 2125 - DNA, 24 bp, Homo sapiens
cttttggattgcatctactgtata

SEQ ID NO: 2126 - DNA, 24 bp, Homo sapiens
tgtgattttcttttggattgcatc

SEQ ID NO: 2127 - DNA, 24 bp, Homo sapiens
atactaaccttggtttctgtgatt

SEQ ID NO: 2128 - DNA, 24 bp, Homo sapiens
aaaaggtatctttgatactaacct

SEQ ID NO: 2129 - DNA, 24 bp, Homo sapiens
aaaaaggtatctttgatactaacc

SEQ ID NO: 2130 - DNA, 24 bp, Homo sapiens
ttttaaaaaggtatctttgatact

SEQ ID NO: 2131 - DNA, 24 bp, Homo sapiens
attttaaaaaggtatctttgatac

SEQ ID NO: 2132 - DNA, 24 bp, Homo sapiens
ttaatgcaaactgggacacaaaca

SEQ ID NO: 2133 - DNA, 24 bp, Homo sapiens
taaattgccatgtttgtgtcccag

SEQ ID NO: 2134 - DNA, 24 bp, Homo sapiens
aaattgccatgtttgtgtcccagt

SEQ ID NO: 2135 - DNA, 24 bp, Homo sapiens
aattgccatgtttgtgtcccagtt

SEQ ID NO: 2136 - DNA, 24 bp, Homo sapiens
tgtcccagtttgcattaacaaata

SEQ ID NO: 2137 - DNA, 24 bp, Homo sapiens
caacatagttctcaaactatttgt

SEQ ID NO: 2138 - DNA, 24 bp, Homo sapiens
ccaacatagttctcaaactatttg

SEQ ID NO: 2139 - DNA, 24 bp, Homo sapiens
tccaacatagttctcaaactattt

SEQ ID NO: 2140 - DNA, 24 bp, Homo sapiens
tttccaacatagttctcaaactat

SEQ ID NO: 2141 - DNA, 24 bp, Homo sapiens
ttttccaacatagttctcaaacta

SEQ ID NO: 2142 - DNA, 24 bp, Homo sapiens
tttttccaacatagttctcaaact

SEQ ID NO: 2143 - DNA, 24 bp, Homo sapiens
cattaacaaatagtttgagaacta

SEQ ID NO: 2144 - DNA, 24 bp, Homo sapiens
agaactatgttggaaaaaaaaata

SEQ ID NO: 2145 - DNA, 24 bp, Homo sapiens
gttcttctagcctggagaaagaag

SEQ ID NO: 2146 - DNA, 24 bp, Homo sapiens
attcttctttctccaggctagaag

SEQ ID NO: 2147 - DNA, 24 bp, Homo sapiens
ttcttctttctccaggctagaaga

SEQ ID NO: 2148 - DNA, 24 bp, Homo sapiens
tccaggctagaagaacaaaagaat

SEQ ID NO: 2149 - DNA, 24 bp, Homo sapiens
aaattctgacaagatattcttttg

SEQ ID NO: 2150 - DNA, 24 bp, Homo sapiens
cttttagttgctgctcttttccag

SEQ ID NO: 2151 - DNA, 24 bp, Homo sapiens
agaaaataaaattaccttgacttg

SEQ ID NO: 2152 - DNA, 24 bp, Homo sapiens
tgcaagcaggccctgggggatttg

SEQ ID NO: 2153 - DNA, 24 bp, Homo sapiens
attttctcaaatcccccagggcct

SEQ ID NO: 2154 - DNA, 24 bp, Homo sapiens
ttttctcaaatcccccagggcctg

SEQ ID NO: 2155 - DNA, 24 bp, Homo sapiens
ctcaaatcccccagggcctgcttg

SEQ ID NO: 2156 - DNA, 24 bp, Homo sapiens
tcaaatcccccagggcctgcttgc

SEQ ID NO: 2157 - DNA, 24 bp, Homo sapiens
ttaattcaatcattggttttctgc

SEQ ID NO: 2158 - DNA, 24 bp, Homo sapiens
taattcaatcattggttttctgcc

SEQ ID NO: 2159 - DNA, 24 bp, Homo sapiens
aattcaatcattggttttctgccc

SEQ ID NO: 2160 - DNA, 24 bp, Homo sapiens
attcaatcattggttttctgccca

SEQ ID NO: 2161 - DNA, 24 bp, Homo sapiens
gcaaggaactatgaataacctaat

SEQ ID NO: 2162 - DNA, 24 bp, Homo sapiens
ctgcccattaggttattcatagtt

SEQ ID NO: 2163 - DNA, 24 bp, Homo sapiens
tgcccattaggttattcatagttc

SEQ ID NO: 2164 - DNA, 24 bp, Homo sapiens
tagaaaacaatttaacaggaaata

SEQ ID NO: 2165 - DNA, 24 bp, Homo sapiens
ctgttaaattgttttctataaacc

SEQ ID NO: 2166 - DNA, 24 bp, Homo sapiens
gaaataaaaaagatgttactgtat

SEQ ID NO: 2167 - DNA, 24 bp, Homo sapiens
agaaataaaaaagatgttactgta

SEQ ID NO: 2168 - DNA, 24 bp, Homo sapiens
ctataaacccttatacagtaacat

SEQ ID NO: 2169 - DNA, 24 bp, Homo sapiens
tataaacccttatacagtaacatc

SEQ ID NO: 2170 - DNA, 24 bp, Homo sapiens
ttatttctaaaagtgttttggctg

SEQ ID NO: 2171 - DNA, 24 bp, Homo sapiens
tatttctaaaagtgttttggctgg

SEQ ID NO: 2172 - DNA, 24 bp, Homo sapiens
atttctaaaagtgttttggctggt

SEQ ID NO: 2173 - DNA, 24 bp, Homo sapiens
tttctaaaagtgttttggctggtc

SEQ ID NO: 2174 - DNA, 24 bp, Homo sapiens
taaaagtgttttggctggtctcac

SEQ ID NO: 2175 - DNA, 24 bp, Homo sapiens
cataatacaaagtaaagtacaatt

SEQ ID NO: 2176 - DNA, 24 bp, Homo sapiens
acataatacaaagtaaagtacaat

SEQ ID NO: 2177 - DNA, 24 bp, Homo sapiens
ggctggtctcacaattgtacttta

SEQ ID NO: 2178 - DNA, 24 bp, Homo sapiens
gctggtctcacaattgtactttac

SEQ ID NO: 2179 - DNA, 24 bp, Homo sapiens
ctttgtattatgtaaaaggaatac

SEQ ID NO: 2180 - DNA, 24 bp, Homo sapiens
tattatgtaaaaggaatacacaac

SEQ ID NO: 2181 - DNA, 24 bp, Homo sapiens
ttcttacaggcaacaatgcaggat

SEQ ID NO: 2182 - DNA, 24 bp, Homo sapiens
gaacagaggcgtccccagttggaa

SEQ ID NO: 2183 - DNA, 24 bp, Homo sapiens
ggcagcggtaatgagttcttccaa

SEQ ID NO: 2184 - DNA, 24 bp, Homo sapiens
tcaaattttgggcagcggtaatga

SEQ ID NO: 2185 - DNA, 24 bp, Homo sapiens
aaaaacaagaccagcaatcaagag

SEQ ID NO: 2186 - DNA, 24 bp, Homo sapiens
tgtgtcccatgcttgttaaaaaac

SEQ ID NO: 2187 - DNA, 24 bp, Homo sapiens
ttaacaagcatgggacacacaaag

SEQ ID NO: 2188 - DNA, 24 bp, Homo sapiens
taacaagcatgggacacacaaagc

SEQ ID NO: 2189 - DNA, 24 bp, Homo sapiens
aacaagcatgggacacacaaagca

SEQ ID NO: 2190 - DNA, 24 bp, Homo sapiens
acaagcatgggacacacaaagcaa

SEQ ID NO: 2191 - DNA, 24 bp, Homo sapiens
ttgaaacttgtcatgcatcttgct

SEQ ID NO: 2192 - DNA, 24 bp, Homo sapiens
attgaaacttgtcatgcatcttgc

SEQ ID NO: 2193 - DNA, 24 bp, Homo sapiens
tattgaaacttgtcatgcatcttg

SEQ ID NO: 2194 - DNA, 24 bp, Homo sapiens
aataaaaacttaagttcatatatc

SEQ ID NO: 2195 - DNA, 24 bp, Homo sapiens
gtgaatatattattggatttctat

SEQ ID NO: 2196 - DNA, 24 bp, Homo sapiens
aagataattcatgaacatcttaat

SEQ ID NO: 2197 - DNA, 24 bp, Homo sapiens
acagaaaagcatacacattactta

SEQ ID NO: 2198 - DNA, 24 bp, Homo sapiens
ctgttaaagaggaagttagaagat

SEQ ID NO: 2199 - DNA, 24 bp, Homo sapiens
tgttaaagaggaagttagaagatc

SEQ ID NO: 2200 - DNA, 24 bp, Homo sapiens
ccgccttccactcagagctcagat

SEQ ID NO: 2201 - DNA, 24 bp, Homo sapiens
ccctcagctcttgaagtaaacggt

SEQ ID NO: 2202 - DNA, 24 bp, Homo sapiens
cttcaagagctgagggcaaagcag

SEQ ID NO: 2203 - DNA, 24 bp, Homo sapiens
aacaaatagctagagccaaagaga

SEQ ID NO: 2204 - DNA, 24 bp, Homo sapiens
gaacaaatagctagagccaaagag

SEQ ID NO: 2205 - DNA, 24 bp, Homo sapiens
gctctagctatttgttcaaaagtg

SEQ ID NO: 2206 - DNA, 24 bp, Homo sapiens
ttcaaaagtgcaactatgaagtga

SEQ ID NO: 2207 - DNA, 24 bp, Homo sapiens
tctctcacccagtcatcacttcat

SEQ ID NO: 2208 - DNA, 24 bp, Homo sapiens
ctctctcacccagtcatcacttca

SEQ ID NO: 2209 - DNA, 24 bp, Homo sapiens
tatatatatatatatttttctctt

SEQ ID NO: 2210 - DNA, 24 bp, Homo sapiens
tctctttctatagacagctaattc

SEQ ID NO: 2211 - DNA, 24 bp, Homo sapiens
ctctttctatagacagctaattca

SEQ ID NO: 2212 - DNA, 24 bp, Homo sapiens
aaacagtaaaaaaatgaattagct

SEQ ID NO: 2213 - DNA, 24 bp, Homo sapiens
tctttctatagacagctaattcat

SEQ ID NO: 2214 - DNA, 24 bp, Homo sapiens
aaaacagtaaaaaaatgaattagc

SEQ ID NO: 2215 - DNA, 24 bp, Homo sapiens
tatagacagctaattcattttttt

SEQ ID NO: 2216 - DNA, 24 bp, Homo sapiens
tattctgtaatataaaaattttaa

SEQ ID NO: 2217 - DNA, 24 bp, Homo sapiens
atattctgtaatataaaaatttta

SEQ ID NO: 2218 - DNA, 24 bp, Homo sapiens
tttactgttttaaaatttttatat

SEQ ID NO: 2219 - DNA, 24 bp, Homo sapiens
ttactgttttaaaatttttatatt

SEQ ID NO: 2220 - DNA, 24 bp, Homo sapiens
tactgttttaaaatttttatatta

SEQ ID NO: 2221 - DNA, 24 bp, Homo sapiens
actgttttaaaatttttatattac

SEQ ID NO: 2222 - DNA, 24 bp, Homo sapiens
ctgttttaaaatttttatattaca

SEQ ID NO: 2223 - DNA, 24 bp, Homo sapiens
aaaatttttatattacagaatata

SEQ ID NO: 2224 - DNA, 24 bp, Homo sapiens
aaatttttatattacagaatataa

SEQ ID NO: 2225 - DNA, 24 bp, Homo sapiens
ttgtagactatcttttatattctg

SEQ ID NO: 2226 - DNA, 24 bp, Homo sapiens
tatattacagaatataaaagatag

SEQ ID NO: 2227 - DNA, 24 bp, Homo sapiens
atattacagaatataaaagatagt

SEQ ID NO: 2228 - DNA, 24 bp, Homo sapiens
tattacagaatataaaagatagtc

SEQ ID NO: 2229 - DNA, 24 bp, Homo sapiens
caatgctgctgtcttcttgctatg

SEQ ID NO: 2230 - DNA, 24 bp, Homo sapiens
caatgggaaaaagttaacaaaatg

SEQ ID NO: 2231 - DNA, 24 bp, Homo sapiens
tgcaagtatcaagaaaaatatatg

SEQ ID NO: 2232 - DNA, 24 bp, Homo sapiens
tcttgatacttgcagaaatgattt

SEQ ID NO: 2233 - DNA, 24 bp, Homo sapiens
cttgatacttgcagaaatgatttg

SEQ ID NO: 2234 - DNA, 24 bp, Homo sapiens
ttgatacttgcagaaatgatttgt

SEQ ID NO: 2235 - DNA, 24 bp, Homo sapiens
ttttcagggaactgtagaatttat

SEQ ID NO: 2236 - DNA, 24 bp, Homo sapiens
catggagggtactgaaataaattc

SEQ ID NO: 2237 - DNA, 24 bp, Homo sapiens
ccatggagggtactgaaataaatt

SEQ ID NO: 2238 - DNA, 24 bp, Homo sapiens
cagggaactgtagaatttatttca

SEQ ID NO: 2239 - DNA, 24 bp, Homo sapiens
tccatggagggtactgaaataaat

SEQ ID NO: 2240 - DNA, 24 bp, Homo sapiens
agggaactgtagaatttatttcag

SEQ ID NO: 2241 - DNA, 24 bp, Homo sapiens
ttccatggagggtactgaaataaa

SEQ ID NO: 2242 - DNA, 24 bp, Homo sapiens
cctgtcttttttccatggagggta

SEQ ID NO: 2243 - DNA, 24 bp, Homo sapiens
ccctgtcttttttccatggagggt

SEQ ID NO: 2244 - DNA, 24 bp, Homo sapiens
tccctgtcttttttccatggaggg

SEQ ID NO: 2245 - DNA, 24 bp, Homo sapiens
tttcagtaccctccatggaaaaaa

SEQ ID NO: 2246 - DNA, 24 bp, Homo sapiens
agtaccctccatggaaaaaagaca

SEQ ID NO: 2247 - DNA, 24 bp, Homo sapiens
agtttgcatggttcttgctcaagg

SEQ ID NO: 2248 - DNA, 24 bp, Homo sapiens
ataagaaaatgcattccttgagca

SEQ ID NO: 2249 - DNA, 24 bp, Homo sapiens
cataagaaaatgcattccttgagc

SEQ ID NO: 2250 - DNA, 24 bp, Homo sapiens
catggttcttgctcaaggaatgca

SEQ ID NO: 2251 - DNA, 24 bp, Homo sapiens
acctacatgtggaaataaattttc

SEQ ID NO: 2252 - DNA, 24 bp, Homo sapiens
gacctacatgtggaaataaatttt

SEQ ID NO: 2253 - DNA, 24 bp, Homo sapiens
tgacctacatgtggaaataaattt

SEQ ID NO: 2254 - DNA, 24 bp, Homo sapiens
cttatgaaaatttatttccacatg

SEQ ID NO: 2255 - DNA, 24 bp, Homo sapiens
ttatgaaaatttatttccacatgt

SEQ ID NO: 2256 - DNA, 24 bp, Homo sapiens
attacatttttgacctacatgtgg

SEQ ID NO: 2257 - DNA, 24 bp, Homo sapiens
cattacatttttgacctacatgtg

SEQ ID NO: 2258 - DNA, 24 bp, Homo sapiens
tcattacatttttgacctacatgt

SEQ ID NO: 2259 - DNA, 24 bp, Homo sapiens
tttccacatgtaggtcaaaaatgt

SEQ ID NO: 2260 - DNA, 24 bp, Homo sapiens
cacatgtaggtcaaaaatgtaatg

SEQ ID NO: 2261 - DNA, 24 bp, Homo sapiens
ttgcaatccagccatgatattttt

SEQ ID NO: 2262 - DNA, 24 bp, Homo sapiens
actgttggtttgttgcaatccagc

SEQ ID NO: 2263 - DNA, 24 bp, Homo sapiens
cactgttggtttgttgcaatccag

SEQ ID NO: 2264 - DNA, 24 bp, Homo sapiens
aatgctctcatccatagtcatagg

SEQ ID NO: 2265 - DNA, 24 bp, Homo sapiens
atgtctcagtaatcttcttaccta

SEQ ID NO: 2266 - DNA, 24 bp, Homo sapiens
caagttatttaatgtctcagtaat

SEQ ID NO: 2267 - DNA, 24 bp, Homo sapiens
acaagttatttaatgtctcagtaa

SEQ ID NO: 2268 - DNA, 24 bp, Homo sapiens
gactctgatgacatatttttcccc

SEQ ID NO: 2269 - DNA, 24 bp, Homo sapiens
tccccagtatggttccagatcatg

SEQ ID NO: 2270 - DNA, 24 bp, Homo sapiens
ccccagtatggttccagatcatgt

SEQ ID NO: 2271 - DNA, 24 bp, Homo sapiens
cccagtatggttccagatcatgtc

SEQ ID NO: 2272 - DNA, 24 bp, Homo sapiens
tatttgtctttgtgtatgtgtgta

SEQ ID NO: 2273 - DNA, 24 bp, Homo sapiens
tctttgtgtatgtgtgtatgtgta

SEQ ID NO: 2274 - DNA, 24 bp, Homo sapiens
tgtatgtgtgtatgtgtatgtgtt

SEQ ID NO: 2275 - DNA, 24 bp, Homo sapiens
aggccagacctatttgactggaat

SEQ ID NO: 2276 - DNA, 24 bp, Homo sapiens
ggccagacctatttgactggaata

SEQ ID NO: 2277 - DNA, 24 bp, Homo sapiens
actggaatagtgtggtttgccagc

SEQ ID NO: 2278 - DNA, 24 bp, Homo sapiens
ccagcagtcagccacacaacgact

SEQ ID NO: 2279 - DNA, 24 bp, Homo sapiens
tctatgcctaattgatatctggcg

SEQ ID NO: 2280 - DNA, 24 bp, Homo sapiens
ccaaccttcaggatcgagtagttt

SEQ ID NO: 2281 - DNA, 24 bp, Homo sapiens
tggactaccactgcttttagtatg

SEQ ID NO: 2282 - DNA, 24 bp, Homo sapiens
agtatggtagagtttaatgttttc

SEQ ID NO: 2283 - DNA, 24 bp, Homo sapiens
gtatggtagagtttaatgttttca

SEQ ID NO: 2284 - DNA, 24 bp, Homo sapiens
agactctaaaaggataatgaacaa

SEQ ID NO: 2285 - DNA, 24 bp, Homo sapiens
actttgatttgttcattatccttt

SEQ ID NO: 2286 - DNA, 24 bp, Homo sapiens
tatatttgagactctaaaaggata

SEQ ID NO: 2287 - DNA, 24 bp, Homo sapiens
atttgttcattatccttttagagt

SEQ ID NO: 2288 - DNA, 24 bp, Homo sapiens
gtttctatatttgagactctaaaa

SEQ ID NO: 2289 - DNA, 24 bp, Homo sapiens
ggtttctatatttgagactctaaa

SEQ ID NO: 2290 - DNA, 24 bp, Homo sapiens
tggtttctatatttgagactctaa

SEQ ID NO: 2291 - DNA, 24 bp, Homo sapiens
ttcattatccttttagagtctcaa

SEQ ID NO: 2292 - DNA, 24 bp, Homo sapiens
agagtctcaaatatagaaaccaaa

SEQ ID NO: 2293 - DNA, 24 bp, Homo sapiens
gagtctcaaatatagaaaccaaaa

SEQ ID NO: 2294 - DNA, 24 bp, Homo sapiens
cacttcctggatggcttcaatgct

SEQ ID NO: 2295 - DNA, 24 bp, Homo sapiens
gcctcaacaagtgagcattgaagc

SEQ ID NO: 2296 - DNA, 24 bp, Homo sapiens
cctcaacaagtgagcattgaagcc

SEQ ID NO: 2297 - DNA, 24 bp, Homo sapiens
ggtggccttggcaacatttccact

SEQ ID NO: 2298 - DNA, 24 bp, Homo sapiens
gtcactttaggtggccttggcaac

SEQ ID NO: 2299 - DNA, 24 bp, Homo sapiens
atgatgtaactgaaaatgttcttc

SEQ ID NO: 2300 - DNA, 24 bp, Homo sapiens
cctgttgagaatagtgcatttgat

SEQ ID NO: 2301 - DNA, 24 bp, Homo sapiens
cagttacatcatcaaatgcactat

SEQ ID NO: 2302 - DNA, 24 bp, Homo sapiens
agttacatcatcaaatgcactatt

SEQ ID NO: 2303 - DNA, 24 bp, Homo sapiens
cacactttacctgttgagaatagt

SEQ ID NO: 2304 - DNA, 24 bp, Homo sapiens
ctgttttatatgcatttttaggta

SEQ ID NO: 2305 - DNA, 24 bp, Homo sapiens
tgttttatatgcatttttaggtat

SEQ ID NO: 2306 - DNA, 24 bp, Homo sapiens
atatgcatttttaggtattacgtg

SEQ ID NO: 2307 - DNA, 24 bp, Homo sapiens
tatgcatttttaggtattacgtgc

SEQ ID NO: 2308 - DNA, 24 bp, Homo sapiens
taggtattacgtgcacatatatat

SEQ ID NO: 2309 - DNA, 24 bp, Homo sapiens
aggtattacgtgcacatatatata

SEQ ID NO: 2310 - DNA, 24 bp, Homo sapiens
ggtattacgtgcacatatatatat

SEQ ID NO: 2311 - DNA, 24 bp, Homo sapiens
agcaacaactataatattgtgcag

SEQ ID NO: 2312 - DNA, 24 bp, Homo sapiens
gttcctccatctttctctttttat

SEQ ID NO: 2313 - DNA, 24 bp, Homo sapiens
tctttttatggagttcactaggtg

SEQ ID NO: 2314 - DNA, 24 bp, Homo sapiens
tatggagttcactaggtgcaccat

SEQ ID NO: 2315 - DNA, 24 bp, Homo sapiens
atggagttcactaggtgcaccatt

SEQ ID NO: 2316 - DNA, 24 bp, Homo sapiens
tggagttcactaggtgcaccattc

SEQ ID NO: 2317 - DNA, 24 bp, Homo sapiens
ataattgcatctgaacatttggtc

SEQ ID NO: 2318 - DNA, 24 bp, Homo sapiens
gtcctttgcagggtgagtgagcga

SEQ ID NO: 2319 - DNA, 24 bp, Homo sapiens
ttccaaagcagcctctcgctcact

SEQ ID NO: 2320 - DNA, 24 bp, Homo sapiens
cagggtgagtgagcgagaggctgc

SEQ ID NO: 2321 - DNA, 24 bp, Homo sapiens
gaagaaactcatagattactgcaa

SEQ ID NO: 2322 - DNA, 24 bp, Homo sapiens
caggtccagggggaactgttgcag

SEQ ID NO: 2323 - DNA, 24 bp, Homo sapiens
ccaggtccagggggaactgttgca

SEQ ID NO: 2324 - DNA, 24 bp, Homo sapiens
agcttctgtaagccaggcaagaaa

SEQ ID NO: 2325 - DNA, 24 bp, Homo sapiens
ttgcctggcttacagaagctgaaa

SEQ ID NO: 2326 - DNA, 24 bp, Homo sapiens
cttacgggtagcatcctgtaggac

SEQ ID NO: 2327 - DNA, 24 bp, Homo sapiens
ctcccttggagtcttctaggagcc

SEQ ID NO: 2328 - DNA, 24 bp, Homo sapiens
actcccttggagtcttctaggagc

SEQ ID NO: 2329 - DNA, 24 bp, Homo sapiens
atcagctcttttactcccttggag

SEQ ID NO: 2330 - DNA, 24 bp, Homo sapiens
cgctttagcactcttgtggatcca

SEQ ID NO: 2331 - DNA, 24 bp, Homo sapiens
gcactcttgtggatccaattgaac

SEQ ID NO: 2332 - DNA, 24 bp, Homo sapiens
tccctggcttgtcagttacaagta

SEQ ID NO: 2333 - DNA, 24 bp, Homo sapiens
gtccctggcttgtcagttacaagt

SEQ ID NO: 2334 - DNA, 24 bp, Homo sapiens
ttttgtccctggcttgtcagttac

SEQ ID NO: 2335 - DNA, 24 bp, Homo sapiens
gttttgtccctggcttgtcagtta

SEQ ID NO: 2336 - DNA, 24 bp, Homo sapiens
tacttgtaactgacaagccaggga

SEQ ID NO: 2337 - DNA, 24 bp, Homo sapiens
gctcctactcagactgttactctg

SEQ ID NO: 2338 - DNA, 24 bp, Homo sapiens
taccatgtattgctaaacaaagta

SEQ ID NO: 2339 - DNA, 24 bp, Homo sapiens
attgaagagtaacaatttgagcca

SEQ ID NO: 2340 - DNA, 24 bp, Mus musculus
aggctctgcaaagttctttgaaag

SEQ ID NO: 2341 - DNA, 24 bp, Mus musculus
aaagagcaacaaaatggcttcaac

SEQ ID NO: 2342 - DNA, 24 bp, Mus musculus
aaagagcaataaaatggcttcaac

SEQ ID NO: 2343 - DNA, 24 bp, Mus musculus
aaagaactttgcagagcctcaaaa

SEQ ID NO: 2344 - DNA, 24 bp, Mus musculus
ctgaatatctatgcattaataact

SEQ ID NO: 2345 - DNA, 24 bp, Mus musculus
tattatattacagggcatattata

SEQ ID NO: 2346 - DNA, 24 bp, Mus musculus
aggtaagccgaggtttggccttta

SEQ ID NO: 2347 - DNA, 24 bp, Mus musculus
cccagagtccttcaaagatattga

SEQ ID NO: 2348 - DNA, 93 bp, Artificial Sequence
  Exemplary Scaffold Sequence
gtttaagagctatgctggaaacagcatagcaagtttaaataaggctagtccgttatcaacttgaaaaagtggcaccgagtcggtgcttttttt

SEQ ID NO: 2349 - DNA, 111 bp, Artificial Sequence
  sgRNA
cttacaggaactccaggagtttaagagctatgctggaaacagcatagcaagtttaaataaggctagtccgttatcaacttgaaaaagtggcaccgagtcggtgcttttttt

SEQ ID NO: 2350 - DNA, 92 bp, Artificial Sequence
  sgRNA
cttacaggaactccaggagttttagagctagaaatagcagttaaaataaggctagtccgttatcaacttgaaaaagtggcaccgagtcggtg

SEQ ID NO: 2351 - DNA, 106 bp, Artificial Sequence
  sgRNA
cttacaggaactccaggagttggaaccattcaaaacagcatagcaagttaaaataaggctagtccgttatcaacttgaaaaagtggcaccgagtcggtgctttttt

SEQ ID NO: 2352 - DNA, 107 bp, Artificial Sequence
  sgRNA
cttacaggaactccaggagtttaagagctatgaaacagcatagcaagtttaaataaggctagtccgttatcaacttgaaaaagtggcaccgagtcggtgcttttttt

SEQ ID NO: 2353 - DNA, 109 bp, Artificial Sequence
  sgRNA
cttacaggaactccaggagtttaagagctatgcgaaacagcatagcaagtttaaataaggctagtccgttatcaacttgaaaaagtggcaccgagtcggtgcttttttt

SEQ ID NO: 2354 - DNA, 116 bp, Artificial Sequence
  sgRNA
atcttacaggaactccaggagtttaagagctatgctgtttgaaacagcatagcaagtttaaataaggctagtccgttatcaacttgaaaaagtggcaccgagtcggtgcttttttt

SEQ ID NO: 2355 - DNA, 118 bp, Artificial Sequence
  sgRNA
atcttacaggaactccaggagtttaagagctatgctgttttggaaacagcatagcaagtttaaataaggctagtccgttatcaacttgaaaaagtggcaccgagtcggtgcttttttt

SEQ ID NO: 2356 - DNA, 18 bp, Homo sapiens
cttacaggaactccagga

SEQ ID NO: 2357 - DNA, 74 bp, Artificial Sequence
  Exemplary Scaffold Sequence
gttttagagctagaaatagcagttaaaataaggctagtccgttatcaacttgaaaaagtggcaccgagtcggtg

SEQ ID NO: 2358 - DNA, 88 bp, Artificial Sequence
  Exemplary Scaffold Sequence
gttggaaccattcaaaacagcatagcaagttaaaataaggctagtccgttatcaacttgaaaaagtggcaccgagtcggtgctttttt

SEQ ID NO: 2359 - DNA, 89 bp, Artificial Sequence
  Exemplary Scaffold Sequence
gtttaagagctatgaaacagcatagcaagtttaaataaggctagtccgttatcaacttgaaaaagtggcaccgagtcggtgcttttttt

SEQ ID NO: 2360 - DNA, 91 bp, Artificial Sequence
  Exemplary Scaffold Sequence
gtttaagagctatgcgaaacagcatagcaagtttaaataaggctagtccgttatcaacttgaaaaagtggcaccgagtcggtgcttttttt

SEQ ID NO: 2361 - DNA, 96 bp, Artificial Sequence
  Exemplary Scaffold Sequence
gtttaagagctatgctgtttgaaacagcatagcaagtttaaataaggctagtccgttatcaacttgaaaaagtggcaccgagtcggtgcttttttt

SEQ ID NO: 2362 - DNA, 98 bp, Artificial Sequence
  Exemplary Scaffold Sequence
gtttaagagctatgctgttttggaaacagcatagcaagtttaaataaggctagtccgttatcaacttgaaaaagtggcaccgagtcggtgcttttttt

SEQ ID NO: 2363 - DNA, 21 bp, Unknown
  SV40 NLS
ccaaagaagaagcggaaggtc

SEQ ID NO: 2364 - DNA, 48 bp, Unknown
  nucleoplasmin NLS
aaaaggccggcggccacgaaaaaggccggccaggcaaaaaagaaaaag

SEQ ID NO: 2365 - DNA, 4101 bp, Artificial Sequence
  human codon optimized sequence encoding SpCas9
gacaagaagtacagcatcggcctggacatcggcaccaactctgtgggctgggccgtgatcaccgacgagtacaaggtgcccagcaagaaattcaaggtgctgggcaacaccgaccggcacagcatcaagaagaacctgatcggagccctgctgttcgacagcggcgaaacagccgaggccacccggctgaagagaaccgccagaagaagatacaccagacggaagaaccggatctgctatctgcaagagatcttcagcaacgagatggccaaggtggacgacagcttcttccacagactggaagagtccttcctggtggaagaggataagaagcacgagcggcaccccatcttcggcaacatcgtggacgaggtggcctaccacgagaagtaccccaccatctaccacctgagaaagaaactggtggacagcaccgacaaggccgacctgcggctgatctatctggccctggcccacatgatcaagttccggggccacttcctgatcgagggcgacctgaaccccgacaacagcgacgtggacaagctgttcatccagctggtgcagacctacaaccagctgttcgaggaaaaccccatcaacgccagcggcgtggacgccaaggccatcctgtctgccagactgagcaagagcagacggctggaaaatctgatcgcccagctgcccggcgagaagaagaatggcctgttcggaaacctgattgccctgagcctgggcctgacccccaacttcaagagcaacttcgacctggccgaggatgccaaactgcagctgagcaaggacacctacgacgacgacctggacaacctgctggcccagatcggcgaccagtacgccgacctgtttctggccgccaagaacctgtccgacgccatcctgctgagcgacatcctgagagtgaacaccgagatcaccaaggcccccctgagcgcctctatgatcaagagatacgacgagcaccaccaggacctgaccctgctgaaagctctcgtgcggcagcagctgcctgagaagtacaaagagattttcttcgaccagagcaagaacggctacgccggctacattgacggcggagccagccaggaagagttctacaagttcatcaagcccatcctggaaaagatggacggcaccgaggaactgctcgtgaagctgaacagagaggacctgctgcggaagcagcggaccttcgacaacggcagcatcccccaccagatccacctgggagagctgcacgccattctgcggcggcaggaagatttttacccattcctgaaggacaaccgggaaaagatcgagaagatcctgaccttccgcatcccctactacgtgggccctctggccaggggaaacagcagattcgcctggatgaccagaaagagcgaggaaaccatcaccccctggaacttcgaggaagtggtggacaagggcgcttccgcccagagcttcatcgagcggatgaccaacttcgataagaacctgcccaacgagaaggtgctgcccaagcacagcctgctgtacgagtacttcaccgtgtataacgagctgaccaaagtgaaatacgtgaccgagggaatgagaaagcccgccttcctgagcggcgagcagaaaaaggccatcgtggacctgctgttcaagaccaaccggaaagtgaccgtgaagcagctgaaagaggactacttcaagaaaatcgagtgcttcgactccgtggaaatctccggcgtggaagatcggttcaacgcctccctgggcacataccacgatctgctgaaaattatcaaggacaaggacttcctggacaatgaggaaaacgaggacattctggaagatatcgtgctgaccctgacactgtttgaggacagagagatgatcgaggaacggctgaaaacctatgcccacctgttcgacgacaaagtgatgaagcagctgaagcggcggagatacaccggctggggcaggctgagccggaagctgatcaacggcatccgggacaagcagtccggcaagacaatcctggatttcctgaagtccgacggcttcgccaacagaaacttcatgcagctgatccacgacgacagcctgacctttaaagaggacatccagaaagcccaggtgtccggccagggcgatagcctgcacgagcacattgccaatctggccggcagccccgccattaagaagggcatcctgcagacagtgaaggtggtggacgagctcgtgaaagtgatgggccggcacaagcccgagaacatcgtgatcgaaatggccagagagaaccagaccacccagaagggacagaagaacagccgcgagagaatgaagcggatcgaagagggcatcaaagagctgggcagccagatcctgaaagaacaccccgtggaaaacacccagctgcagaacgagaagctgtacctgtactacctgcagaatgggcgggatatgtacgtggaccaggaactggacatcaaccggctgtccgactacgatgtggaccatatcgtgcctcagagctttctgaaggacgactccatcgacaacaaggtgctgaccagaagcgacaagaaccggggcaagagcgacaacgtgccctccgaagaggtcgtgaagaagatgaagaactactggcggcagctgctgaacgccaagctgattacccagagaaagttcgacaatctgaccaaggccgagagaggcggcctgagcgaactggataaggccggcttcatcaagagacagctggtggaaacccggcagatcacaaagcacgtggcacagatcctggactcccggatgaacactaagtacgacgagaatgacaagctgatccgggaagtgaaagtgatcaccctgaagtccaagctggtgtccgatttccggaaggatttccagttttacaaagtgcgcgagatcaacaactaccaccacgcccacgacgcctacctgaacgccgtcgtgggaaccgccctgatcaaaaagtaccctaagctggaaagcgagttcgtgtacggcgactacaaggtgtacgacgtgcggaagatgatcgccaagagcgagcaggaaatcggcaaggctaccgccaagtacttcttctacagcaacatcatgaactttttcaagaccgagattaccctggccaacggcgagatccggaagcggcctctgatcgagacaaacggcgaaaccggggagatcgtgtgggataagggccgggattttgccaccgtgcggaaagtgctgagcatgccccaagtgaatatcgtgaaaaagaccgaggtgcagacaggcggcttcagcaaagagtctatcctgcccaagaggaacagcgataagctgatcgccagaaagaaggactgggaccctaagaagtacggcggcttcgacagccccaccgtggcctattctgtgctggtggtggccaaagtggaaaagggcaagtccaagaaactgaagagtgtgaaagagctgctggggatcaccatcatggaaagaagcagcttcgagaagaatcccatcgactttctggaagccaagggctacaaagaagtgaaaaaggacctgatcatcaagctgcctaagtactccctgttcgagctggaaaacggccggaagagaatgctggcctctgccggcgaactgcagaagggaaacgaactggccctgccctccaaatatgtgaacttcctgtacctggccagccactatgagaagctgaagggctcccccgaggataatgagcagaaacagctgtttgtggaacagcacaagcactacctggacgagatcatcgagcagatcagcgagttctccaagagagtgatcctggccgacgctaatctggacaaagtgctgtccgcctacaacaagcaccgggataagcccatcagagagcaggccgagaatatcatccacctgtttaccctgaccaatctgggagcccctgccgccttcaagtactttgacaccaccatcgaccggaagaggtacaccagcaccaaagaggtgctggacgccaccctgatccaccagagcatcaccggcctgtacgagacacggatcgacctgtctcagctgggaggcgac

SEQ ID NO: 2366 - DNA, 94 bp, Artificial Sequence
  sgRNA
caccagagtaacagtctgaggttttagagctagaaatagcagttaaaataaggctagtccgttatcaacttgaaaaagtggcaccgagtcggtg

SEQ ID NO: 2367 - DNA, 108 bp, Artificial Sequence
  sgRNA
caccagagtaacagtctgaggttggaaccattcaaaacagcatagcaagttaaaataaggctagtccgttatcaacttgaaaaagtggcaccgagtcggtgctttttt

SEQ ID NO: 2368 - DNA, 109 bp, Artificial Sequence
  sgRNA
caccagagtaacagtctgaggtttaagagctatgaaacagcatagcaagtttaaataaggctagtccgttatcaacttgaaaaagtggcaccgagtcggtgcttttttt

SEQ ID NO: 2369 - DNA, 111 bp, Artificial Sequence
  sgRNA
caccagagtaacagtctgaggtttaagagctatgcgaaacagcatagcaagtttaaataaggctagtccgttatcaacttgaaaaagtggcaccgagtcggtgcttttttt

SEQ ID NO: 2370 - DNA, 116 bp, Artificial Sequence
  sgRNA
caccagagtaacagtctgaggtttaagagctatgctgtttgaaacagcatagcaagtttaaataaggctagtccgttatcaacttgaaaaagtggcaccgagtcggtgcttttttt

SEQ ID NO: 2371 - DNA, 118 bp, Artificial Sequence
  sgRNA
caccagagtaacagtctgaggtttaagagctatgctgttttggaaacagcatagcaagtttaaataaggctagtccgttatcaacttgaaaaagtggcaccgagtcggtgcttttttt

SEQ ID NO: 2372 - DNA, 113 bp, Artificial Sequence
  sgRNA
atcttacaggaactccaggagtttaagagctatgctggaaacagcatagcaagtttaaataaggctagtccgttatcaacttgaaaaagtggcaccgagtcggtgcttttttt

SEQ ID NO: 2373 - DNA, 94 bp, Artificial Sequence
  sgRNA
atcttacaggaactccaggagttttagagctagaaatagcagttaaaataaggctagtccgttatcaacttgaaaaagtggcaccgagtcggtg

SEQ ID NO: 2374 - DNA, 108 bp, Artificial Sequence
  sgRNA
atcttacaggaactccaggagttggaaccattcaaaacagcatagcaagttaaaataaggctagtccgttatcaacttgaaaaagtggcaccgagtcggtgctttttt

SEQ ID NO: 2375 - DNA, 109 bp, Artificial Sequence
  sgRNA
atcttacaggaactccaggagtttaagagctatgaaacagcatagcaagtttaaataaggctagtccgttatcaacttgaaaaagtggcaccgagtcggtgcttttttt

SEQ ID NO: 2376 - DNA, 111 bp, Artificial Sequence
  sgRNA
atcttacaggaactccaggagtttaagagctatgcgaaacagcatagcaagtttaaataaggctagtccgttatcaacttgaaaaagtggcaccgagtcggtgcttttttt

SEQ ID NO: 2377 - DNA, 116 bp, Artificial Sequence; identical to SEQ ID NO: 2354
  sgRNA

SEQ ID NO: 2378 - DNA, 118 bp, Artificial Sequence; identical to SEQ ID NO: 2355
  sgRNA

SEQ ID NO: 2379 - protein, 743 aa, Artificial Sequence
  Synthetic polypeptide
MAADGYLPDWLEDNLSEGIREWWALKPGAPQPKANQQHQDNARGLVLPGYKYLGPGNGLDKGEPVNAADAAALEHDKAYDQQLKAGDNPYLKYNHADAEFQERLKEDTSFGGNLGRAVFQAKKRLLEPLGLVEEAAKTAPGKKRPVEQSPQEPDSSAGIGKSGAQPAKKRLNFGQTGDTESVPDPQPIGEPPAAPSGVGSLTMASGGGAPVADNNEGADGVGSSSGNWHCDSQWLGDRVITTSTRTWALPTYNNHLYKQISNSTSGGSSNDNAYFGYSTPWGYFDFNRFHCHFSPRDWQRLINNNWGFRPKRLNFKLFNIQVKEVTDNNGVKTIANNLTSTVQVFTDSDYQLPYVLGSAHEGCLPPFPADVFMIPQYGYLTLNDGSQAVGRSSFYCLEYFPSQMLRTGNNFQFSYEFENVPFHSSYAHSQSLDRLMNPLIDQYLYYLSKTINGSGQNQQTLKFSVAGPSNMAVQGRNYIPGPSYRQQRVSTTVTQNNNSEFAWPGASSWALNGRNSLMNPGPAMASHKEGEDRFFPLSGSLIFGKQGTGRDNVDADKVMITNEEEIKTTNPVATESYGQVATNHQSDGTLAVPFKAQAQTGWVQNQGILPGMVWQDRDVYLQGPIWAKIPHTDGNFHPSPLMGGFGMKHPPPQILIKNTPVPADPPTAFNKDKLNSFITQYSTGQVSVEIEWELQKENSKRWNPEIQYTSNYYKSNNVEFAVNTEGVYSEPRPIGTRYLTRNL

SEQ ID NO: 2380 - DNA, 2232 bp, Artificial Sequence
  Synthetic polynucleotide
atggctgccgatggttatcttccagattggctcgaggacaaccttagtgaaggaattcgcgagtggtgggctttgaaacctggagcccctcaacccaaggcaaatcaacaacatcaagacaacgctcgaggtcttgtgcttccgggttacaaataccttggacccggcaacggactcgacaagggggagccggtcaacgcagcagacgcggcggccctcgagcacgacaaggcctacgaccagcagctcaaggccggagacaacccgtacctcaagtacaaccacgccgacgccgagttccaggagcggctcaaagaagatacgtcttttgggggcaacctcgggcgagcagtcttccaggccaaaaagaggcttcttgaacctcttggtctggttgaggaagcggctaagacggctcctggaaagaagaggcctgtagagcagtctcctcaggaaccggactcctccgcgggtattggcaaatcgggtgcacagcccgctaaaaagagactcaatttcggtcagactggcgacacagagtcagtcccagaccctcaaccaatcggagaacctcccgcagccccctcaggtgtgggatctcttacaatggcttcaggtggtggcgcaccagtggcagacaataacgaaggtgccgatggagtgggtagttcctcgggaaattggcattgcgattcccaatggctgggggacagagtcatcaccaccagcacccgaacctgggccctgcccacctacaacaatcacctctacaagcaaatctccaacagcacatctggaggatcttcaaatgacaacgcctacttcggctacagcaccccctgggggtattttgacttcaacagattccactgccacttctcaccacgtgactggcagcgactcatcaacaacaactggggattccggcctaagcgactcaacttcaagctcttcaacattcaggtcaaagaggttacggacaacaatggagtcaagaccatcgccaataaccttaccagcacggtccaggtcttcacggactcagactatcagctcccgtacgtgctcgggtcggctcacgagggctgcctcccgccgttcccagcggacgttttcatgattcctcagtacgggtatctgacgcttaatgatggaagccaggccgtgggtcgttcgtccttttactgcctggaatatttcccgtcgcaaatgctaagaacgggtaacaacttccagttcagctacgagtttgagaacgtacctttccatagcagctacgctcacagccaaagcctggaccgactaatgaatccactcatcgaccaatacttgtactatctctcaaagactattaacggttctggacagaatcaacaaacgctaaaattcagtgtggccggacccagcaacatggctgtccagggaagaaactacatacctggacccagctaccgacaacaacgtgtctcaaccactgtgactcaaaacaacaacagcgaatttgcttggcctggagcttcttcttgggctctcaatggacgtaatagcttgatgaatcctggacctgctatggccagccacaaagaaggagaggaccgtttctttcctttgtctggatctttaatttttggcaaacaaggaactggaagagacaacgtggatgcggacaaagtcatgataaccaacgaagaagaaattaaaactactaacccggtagcaacggagtcctatggacaagtggccacaaaccaccagagtgcccaaactttggcggtgccttttaaggcacaggcgcagaccggctgggttcaaaaccaaggaatacttccgggtatggtttggcaggacagagatgtgtacctgcaaggacccatttgggccaaaattcctcacacggacggcaactttcacccttctccgctgatgggagggtttggaatgaagcacccgcctcctcagatcctcatcaaaaacacacctgtacctgcggatcctccaacggccttcaacaaggacaagctgaactctttcatcacccagtattctactggccaagtcagcgtggagatcgagtgggagctgcagaaggaaaacagcaagcgctggaacccggagatccagtacacttccaactattacaagtctaataatgttgaatttgctgttaatactgaaggtgtatatagtgaaccccgccccattggcaccagatacctgactcgtaatctgtaa

SEQ ID NO: 2381 - protein, 743 aa, Artificial Sequence
  Synthetic polypeptide
MAADGYLPDWLEDNLSEGIREWWALKPGAPQPKANQQHQDNARGLVLPGYKYLGPGNGLDKGEPVNAADAAALEHDKAYDQQLKAGDNPYLKYNHADAEFQERLKEDTSFGGNLGRAVFQAKKRLLEPLGLVEEAAKTAPGKKRPVEQSPQEPDSSAGIGKSGAQPAKKRLNFGQTGDTESVPDPQPIGEPPAAPSGVGSLTMASGGGAPVADNNEGADGVGSSSGNWHCDSQWLGDRVITTSTRTWALPTYNNHLYKQISNSTSGGSSNDNAYFGYSTPWGYFDFNRFHCHFSPRDWQRLINNNWGFRPKRLNFKLFNIQVKEVTDNNGVKTIANNLTSTVQVFTDSDYQLPYVLGSAHEGCLPPFPADVFMIPQYGYLTLNDGSQAVGRSSFYCLEYFPSQMLRTGNNFQFSYEFENVPFHSSYAHSQSLDRLMNPLIDQYLYYLSRTINGSGQNQQTLKFSVAGPSNMAVQGRNYIPGPSYRQQRVSTTVTQNNNSEFAWPGASSWALNGRNSLMNPGPAMASHKEGEDRFFPLSGSLIFGKQGTGRDNVDADKVMITNEEEIKTTNPVATESYGQVATNHQSDGTLAVPFKAQAQTGWVQNQGILPGMVWQDRDVYLQGPIWAKIPHTDGNFHPSPLMGGFGMKHPPPQILIKNTPVPADPPTAFNKDKLNSFITQYSTGQVSVEIEWELQKENSKRWNPEIQYTSNYYKSNNVEFAVNTEGVYSEPRPIGTRYLTRNL

SEQ ID NO: 2382 - protein, 743 aa, Artificial Sequence
  Synthetic polypeptide
MAADGYLPDWLEDNLSEGIREWWALKPGAPQPKANQQHQDNARGLVLPGYKYLGPGNGLDKGEPVNAADAAALEHDKAYDQQLKAGDNPYLKYNHADAEFQERLKEDTSFGGNLGRAVFQAKKRLLEPLGLVEEAAKTAPGKKRPVEQSPQEPDSSAGIGKSGAQPAKKRLNFGQTGDTESVPDPQPIGEPPAAPSGVGSLTMASGGGAPVADNNEGADGVGSSSGNWHCDSQWLGDRVITTSTRTWALPTYNNHLYKQISNSTSGGSSNDNAYFGYSTPWGYFDFNRFHCHFSPRDWQRLINNNWGFRPKRLNFKLFNIQVKEVTDNNGVKTIANNLTSTVQVFTDSDYQLPYVLGSAHEGCLPPFPADVFMIPQYGYLTLNDGSQAVGRSSFYCLEYFPSQMLRTGNNFQFSYEFENVPFHSSYAHSQSLDRLMNPLIDQYLYYLSRTINGSGQNQQTLKFSVAGPSNMAVQGRNYIPGPSYRQQRVSTTVTQNNNSEFAWPGASSWALNGRNSLMNPGPAMASHKEGEDRFFPLSGSLIFGKQGTGRDNVDADKVMITNEEEIKTTNPVATESYGQVATNHQSAQTLAVPFKAQAQTGWVQNQGILPGMVWQDRDVYLQGPIWAKIPHTDGNFHPSPLMGGFGMKHPPPQILIKNTPVPADPPTAFNKDKLNSFITQYSTGQVSVEIEWELQKENSKRWNPEIQYTSNYYKSNNVEFAVNTEGVYSEPRPIGTRYLTRNL

SEQ ID NO: 2383 - DNA, 2232 bp, Artificial Sequence
  Synthetic polynucleotide
atggctgccgatggttatcttccagattggctcgaggacaaccttagtgaaggaattcgcgagtggtgggctttgaaacctggagcccctcaacccaaggcaaatcaacaacatcaagacaacgctcgaggtcttgtgcttccgggttacaaataccttggacccggcaacggactcgacaagggggagccggtcaacgcagcagacgcggcggccctcgagcacgacaaggcctacgaccagcagctcaaggccggagacaacccgtacctcaagtacaaccacgccgacgccgagttccaggagcggctcaaagaagatacgtcttttgggggcaacctcgggcgagcagtcttccaggccaaaaagaggcttcttgaacctcttggtctggttgaggaagcggctaagacggctcctggaaagaagaggcctgtagagcagtctcctcaggaaccggactcctccgcgggtattggcaaatcgggtgcacagcccgctaaaaagagactcaatttcggtcagactggcgacacagagtcagtcccagaccctcaaccaatcggagaacctcccgcagccccctcaggtgtgggatctcttacaatggcttcaggtggtggcgcaccagtggcagacaataacgaaggtgccgatggagtgggtagttcctcgggaaattggcattgcgattcccaatggctgggggacagagtcatcaccaccagcacccgaacctgggccctgcccacctacaacaatcacctctacaagcaaatctccaacagcacatctggaggatcttcaaatgacaacgcctacttcggctacagcaccccctgggggtattttgacttcaacagattccactgccacttctcaccacgtgactggcagcgactcatcaacaacaactggggattccggcctaagcgactcaacttcaagctcttcaacattcaggtcaaagaggttacggacaacaatggagtcaagaccatcgccaataaccttaccagcacggtccaggtcttcacggactcagactatcagctcccgtacgtgctcgggtcggctcacgagggctgcctcccgccgttcccagcggacgttttcatgattcctcagtacgggtatctgacgcttaatgatggaagccaggccgtgggtcgttcgtccttttactgcctggaatatttcccgtcgcaaatgctaagaacgggtaacaacttccagttcagctacgagtttgagaacgtacctttccatagcagctacgctcacagccaaagcctggaccgactaatgaatccactcatcgaccaatacttgtactatctctctagaactattaacggttctggacagaatcaacaaacgctaaaattcagtgtggccggacccagcaacatggctgtccagggaagaaactacatacctggacccagctaccgacaacaacgtgtctcaaccactgtgactcaaaacaacaacagcgaatttgcttggcctggagcttcttcttgggctctcaatggacgtaatagcttgatgaatcctggacctgctatggccagccacaaagaaggagaggaccgtttctttcctttgtctggatctttaatttttggcaaacaaggtaccggcagagacaacgtggatgcggacaaagtcatgataaccaacgaagaagaaattaaaactactaacccggtagcaacggagtcctatggacaagtggccacaaaccaccagagtgcccaaactttggcggtgccttttaaggcacaggcgcagaccggttgggttcaaaaccaaggaatacttccgggtatggtttggcaggacagagatgtgtacctgcaaggacccatttgggccaaaattcctcacacggacggcaactttcacccttctccgctgatgggagggtttggaatgaagcacccgcctcctcagatcctcatcaaaaacacacctgtacctgcggatcctccaacggccttcaacaaggacaagctgaactctttcatcacccagtattctactggccaagtcagcgtggagatcgagtgggagctgcagaaggaaaacagcaagcgctggaacccggagatccagtacacttccaactattacaagtctaataatgttgaatttgctgttaatactgaaggtgtatatagtgaaccccgccccattggcaccagatacctgactcgtaatctgtaa

SEQ ID NO: 2384 - protein, 736 aa, Artificial Sequence
  Synthetic polypeptide
MAADGYLPDWLEDNLSEGIREWWALKPGAPQPKANQQHQDNARGLVLPGYKYLGPGNGLDKGEPVNAADAAALEHDKAYDQQLKAGDNPYLKYNHADAEFQERLKEDTSFGGNLGRAVFQAKKRLLEPLGLVEEAAKTAPGKKRPVEQSPQEPDSSAGIGKSGAQPAKKRLNFGQTGDTESVPDPQPIGEPPAAPSGVGSLTMASGGGAPVADNNEGADGVGSSSGNWHCDSQWLGDRVITTSTRTWALPTYNNHLYKQISNSTSGGSSNDNAYFGYSTPWGYFDFNRFHCHFSPRDWQRLINNNWGFRPKRLNFKLFNIQVKEVTDNNGVKTIANNLTSTVQVFTDSDYQLPYVLGSAHEGCLPPFPADVFMIPQYGYLTLNDGSQAVGRSSFYCLEYFPSQMLRTGNNFQFSYEFENVPFHSSYAHSQSLDRLMNPLIDQYLYYLSRTIQSSQTPRQTLKFSVAGPSNMAVQGRNYIPGPSYRQQRVSTTVTQNNNSEFAWPGASSWALNGRNSLMNPGPAMASHKEGEDRFFPLSGSLIFGKQGTGRDNVDADKVMITNEEEIKTTNPVATESYGQVATNHQSAQAQAQTGWVQNQGILPGMVWQDRDVYLQGPIWAKIPHTDGNFHPSPLMGGFGMKHPPPQILIKNTPVPADPPTAFNKDKLNSFITQYSTGQVSVEIEWELQKENSKRWNPEIQYTSNYYKSNNVEFAVNTEGVYSEPRPIGTRYLTRNL

SEQ ID NO: 2385 - protein, 743 aa, Artificial Sequence
  Synthetic polypeptide
MAADGYLPDWLEDNLSEGIREWWALKPGAPQPKANQQHQDNARGLVLPGYKYLGPGNGLDKGEPVNAADAAALEHDKAYDQQLKAGDNPYLKYNHADAEFQERLKEDTSFGGNLGRAVFQAKKRLLEPLGLVEEAAKTAPGKKRPVEQSPQEPDSSAGIGKSGAQPAKKRLNFGQTGDTESVPDPQPIGEPPAAPSGVGSLTMASGGGAPVADNNEGADGVGSSSGNWHCDSQWLGDRVITTSTRTWALPTYNNHLYKQISNSTSGGSSNDNAYFGYSTPWGYFDFNRFHCHFSPRDWQRLINNNWGFRPKRLNFKLFNIQVKEVTDNNGVKTIANNLTSTVQVFTDSDYQLPYVLGSAHEGCLPPFPADVFMIPQYGYLTLNDGSQAVGRSSFYCLEYFPSQMLRTGNNFQFSYEFENVPFHSSYAHSQSLDRLMNPLIDQYLYYLSRTIILGTGTSQTLKFSVAGPSNMAVQGRNYIPGPSYRQQRVSTTVTQNNNSEFAWPGASSWALNGRNSLMNPGPAMASHKEGEDRFFPLSGSLIFGKQGTGRDNVDADKVMITNEEEIKTTNPVATESYGQVATNHQSAQTRTNPEAAQAQTGWVQNQGILPGMVWQDRDVYLQGPIWAKIPHTDGNFHPSPLMGGFGMKHPPPQILIKNTPVPADPPTAFNKDKLNSFITQYSTGQVSVEIEWELQKENSKRWNPEIQYTSNYYKSNNVEFAVNTEGVYSEPRPIGTRYLTRNL

SEQ ID NO: 2386 - protein, 743 aa, Artificial Sequence
  Synthetic polypeptide
MAADGYLPDWLEDNLSEGIREWWALKPGAPQPKANQQHQDNARGLVLPGYKYLGPGNGLDKGEPVNAADAAALEHDKAYDQQLKAGDNPYLKYNHADAEFQERLKEDTSFGGNLGRAVFQAKKRLLEPLGLVEEAAKTAPGKKRPVEQSPQEPDSSAGIGKSGAQPAKKRLNFGQTGDTESVPDPQPIGEPPAAPSGVGSLTMASGGGAPVADNNEGADGVGSSSGNWHCDSQWLGDRVITTSTRTWALPTYNNHLYKQISNSTSGGSSNDNAYFGYSTPWGYFDFNRFHCHFSPRDWQRLINNNWGFRPKRLNFKLFNIQVKEVTDNNGVKTIANNLTSTVQVFTDSDYQLPYVLGSAHEGCLPPFPADVFMIPQYGYLTLNDGSQAVGRSSFYCLEYFPSQMLRTGNNFQFSYEFENVPFHSSYAHSQSLDRLMNPLIDQYLYYLSRTIILGTGTSQTLKFSVAGPSNMAVQGRNYIPGPSYRQQRVSTTVTQNNNSEFAWPGASSWALNGRNSLMNPGPAMASHKEGEDRFFPLSGSLIFGKQGTGRDNVDADKVMITNEEEIKTTNPVATESYGQVATNHQSAQNGGTSSSAQAQTGWVQNQGILPGMVWQDRDVYLQGPIWAKIPHTDGNFHPSPLMGGFGMKHPPPQILIKNTPVPADPPTAFNKDKLNSFITQYSTGQVSVEIEWELQKENSKRWNPEIQYTSNYYKSNNVEFAVNTEGVYSEPRPIGTRYLTRNL

SEQ ID NO: 2387 - protein, 743 aa, Artificial Sequence
  Synthetic polypeptide
MAADGYLPDWLEDNLSEGIREWWALKPGAPQPKANQQHQDNARGLVLPGYKYLGPGNGLDKGEPVNAADAAALEHDKAYDQQLKAGDNPYLKYNHADAEFQERLKEDTSFGGNLGRAVFQAKKRLLEPLGLVEEAAKTAPGKKRPVEQSPQEPDSSAGIGKSGAQPAKKRLNFGQTGDTESVPDPQPIGEPPAAPSGVGSLTMASGGGAPVADNNEGADGVGSSSGNWHCDSQWLGDRVITTSTRTWALPTYNNHLYKQISNSTSGGSSNDNAYFGYSTPWGYFDFNRFHCHFSPRDWQRLINNNWGFRPKRLNFKLFNIQVKEVTDNNGVKTIANNLTSTVQVFTDSDYQLPYVLGSAHEGCLPPFPADVFMIPQYGYLTLNDGSQAVGRSSFYCLEYFPSQMLRTGNNFQFSYEFENVPFHSSYAHSQSLDRLMNPLIDQYLYYLSRTINGSGQNQQTLKFSVAGPSNMAVQGRNYIPGPSYRQQRVSTTVTQNNNSEFAWPGASSWALNGRNSLMNPGPAMASHKEGEDRFFPLSGSLIFGKQGTGRDNVDADKVMITNEEEIKTTNPVATESYGQVATNHQSAQQAVRTSLAQAQTGWVQNQGILPGMVWQDRDVYLQGPIWAKIPHTDGNFHPSPLMGGFGMKHPPPQILIKNTPVPADPPTAFNKDKLNSFITQYSTGQVSVEIEWELQKENSKRWNPEIQYTSNYYKSNNVEFAVNTEGVYSEPRPIGTRYLTRNL

SEQ ID NO: 2388 - protein, 736 aa, Artificial Sequence
  Synthetic polypeptide
MAADGYLPDWLEDNLSEGIREWWALKPGAPQPKANQQHQDNARGLVLPGYKYLGPGNGLDKGEPVNAADAAALEHDKAYDQQLKAGDNPYLKYNHADAEFQERLKEDTSFGGNLGRAVFQAKKRLLEPLGLVEEAAKTAPGKKRPVEQSPQEPDSSAGIGKSGAQPAKKRLNFGQTGDTESVPDPQPIGEPPAAPSGVGSLTMASGGGAPVADNNEGADGVGSSSGNWHCDSQWLGDRVITTSTRTWALPTYNNHLYKQISNSTSGGSSNDNAYFGYSTPWGYFDFNRFHCHFSPRDWQRLINNNWGFRPKRLNFKLFNIQVKEVTDNNGVKTIANNLTSTVQVFTDSDYQLPYVLGSAHEGCLPPFPADVFMIPQYGYLTLNDGSQAVGRSSFYCLEYFPSQMLRTGNNFQFSYEFENVPFHSSYAHSQSLDRLMNPLIDQYLYYLSRTINGSGQNQQTLKFSVAGPSNMAVQGRNYIPGPSYRQQRVSTTVTQNNNSEFAWPGASSWALNGRNSLMNPGPAMASHKEGEDRFFPLSGSLIFGKQGTGRDNVDADKVMITNEEEIKTTNPVATESYGQVATNHQSAQAQAQTGWVQNQGILPGMVWQDRDVYLQGPIWAKIPHTDGNFHPSPLMGGFGMKHPPPQILIKNTPVPADPPTAFNKDKLNSFITQYSTGQVSVEIEWELQKENSKRWNPEIQYTSNYYKSNNVEFAVNTEGVYSEPRPIGTRYLTRNL

SEQ ID NO: 2389 - DNA, 2211 bp, Artificial Sequence
  Synthetic polynucleotide
atggctgccgatggttatcttccagattggctcgaggacaacctctctgagggcattcgcgagtggtgggacttgaaacctggagccccgaagcccaaagccaaccagcaaaagcaggacgacggccggggtctggtgcttcctggctacaagtacctcggacccttcaacggactcgacaagggggagcccgtcaacgcggcggacgcagcggccctcgagcacgacaaggcctacgaccagcagctcaaagcgggtgacaatccgtacctgcggtataaccacgccgacgccgagtttcaggagcgtctgcaagaagatacgtcttttgggggcaacctcgggcgagcagtcttccaggccaagaagcgggttctcgaacctctcggtctggttgaggaaggcgctaagacggctcctggaaagaaacgtccggtagagcagtcgccacaagagccagactcctcctcgggcatcggcaagacaggccagcagcccgctaaaaagagactcaattttggtcagactggcgactcagagtcagtccccgatccacaacctctcggagaacctccagcaacccccgctgctgtgggacctactacaatggcttcaggcggtggcgcaccaatggcagacaataacgaaggcgccgacggagtgggtaatgcctcaggaaattggcattgcgattccacatggctgggcgacagagtcatcaccaccagcacccgcacctgggccttgcccacctacaataaccacctctacaagcaaatctccagtgcttcaacgggggccagcaacgacaaccactacttcggctacagcaccccctgggggtattttgatttcaacagattccactgccacttttcaccacgtgactggcagcgactcatcaacaacaattggggattccggcccaagagactcaacttcaaactcttcaacatccaagtcaaggaggtcacgacgaatgatggcgtcacaaccatcgctaataaccttaccagcacggttcaagtcttctcggactcggagtaccagcttccgtacgtcctcggctctgcgcaccagggctgcctccctccgttcccggcggacgtgttcatgattccgcaatacggctacctgacgctcaacaatggcagccaagccgtgggacgttcatccttttactgcctggaatatttcccttctcagatgctgagaacgggcaacaactttaccttcagctacacctttgaggaagtgcctttccacagcagctacgcgcacagccagagcctggaccggctgatgaatcctctcatcgaccaatacctgtattacctgaacagaactcaaaatcagtccggaagtgcccaaaacaaggacttgctgtttagccgtgggtctccagctggcatgtctgttcagcccaaaaactggctacctggaccctgttatcggcagcagcgcgtttctaaaacaaaaacagacaacaacaacagcaattttacctggactggtgcttcaaaatataacctcaatgggcgtgaatccatcatcaaccctggcactgctatggcctcacacaaagacgacgaagacaagttctttcccatgagcggtgtcatgatttttggaaaagagagcgccggagcttcaaacactgcattggacaatgtcatgattacagacgaagaggaaattaaagccactaaccctgtggccaccgaaagatttgggaccgtggcagtcaatttccagagcagcagcacagaccctgcgaccggagatgtgcatgctatgggagcattacctggcatggtgtggcaagatagagacgtgtacctgcagggtcccatttgggccaaaattcctcacacagatggacactttcacccgtctcctcttatgggcggctttggactcaagaacccgcctcctcagatcctcatcaaaaacacgcctgttcctgcgaatcctccggcggagttttcagctacaaagtttgcttcattcatcacccaatactccacaggacaagtgagtgtggaaattgaatgggagctgcagaaagaaaacagcaagcgctggaatcccgaagtgcagtacacatccaattatgcaaaatctgccaacgttgattttactgtggacaacaatggactttatactgagcctcgccccattggcacccgttaccttacccgtcccctgtaa

SEQ ID NO: 2390 - protein, 736 aa, Adeno-associated virus serotype 1
MAADGYLPDWLEDNLSEGIREWWDLKPGAPKPKANQQKQDDGRGLVLPGYKYLGPFNGLDKGEPVNAADAAALEHDKAYDQQLKAGDNPYLRYNHADAEFQERLQEDTSFGGNLGRAVFQAKKRVLEPLGLVEEGAKTAPGKKRPVEQSPQEPDSSSGIGKTGQQPAKKRLNFGQTGDSESVPDPQPLGEPPATPAAVGPTTMASGGGAPMADNNEGADGVGNASGNWHCDSTWLGDRVITTSTRTWALPTYNNHLYKQISSASTGASNDNHYFGYSTPWGYFDFNRFHCHFSPRDWQRLINNNWGFRPKRLNFKLFNIQVKEVTTNDGVTTIANNLTSTVQVFSDSEYQLPYVLGSAHQGCLPPFPADVFMIPQYGYLTLNNGSQAVGRSSFYCLEYFPSQMLRTGNNFTFSYTFEEVPFHSSYAHSQSLDRLMNPLIDQYLYYLNRTQNQSGSAQNKDLLFSRGSPAGMSVQPKNWLPGPCYRQQRVSKTKTDNNNSNFTWTGASKYNLNGRESIINPGTAMASHKDDEDKFFPMSGVMIFGKESAGASNTALDNVMITDEEEIKATNPVATERFGTVAVNFQSSSTDPATGDVHAMGALPGMVWQDRDVYLQGPIWAKIPHTDGHFHPSPLMGGFGLKNPPPQILIKNTPVPANPPAEFSATKFASFITQYSTGQVSVEIEWELQKENSKRWNPEVQYTSNYAKSANVDFTVDNNGLYTEPRPIGTRYLTRPL

SEQ ID NO: 2391 - DNA, 4718 bp, Adeno-associated virus serotype 1
ttgcccactccctctctgcgcgctcgctcgctcggtggggcctgcggaccaaaggtccgcagacggcagagctctgctctgccggccccaccgagcgagcgagcgcgcagagagggagtgggcaactccatcactaggggtaatcgcgaagcgcctcccacgctgccgcgtcagcgctgacgtaaattacgtcataggggagtggtcctgtattagctgtcacgtgagtgcttttgcgacattttgcgacaccacgtggccatttagggtatatatggccgagtgagcgagcaggatctccattttgaccgcgaaatttgaacgagcagcagccatgccgggcttctacgagatcgtgatcaaggtgccgagcgacctggacgagcacctgccgggcatttctgactcgtttgtgagctgggtggccgagaaggaatgggagctgcccccggattctgacatggatctgaatctgattgagcaggcacccctgaccgtggccgagaagctgcagcgcgacttcctggtccaatggcgccgcgtgagtaaggccccggaggccctcttctttgttcagttcgagaagggcgagtcctacttccacctccatattctggtggagaccacgggggtcaaatccatggtgctgggccgcttcctgagtcagattagggacaagctggtgcagaccatctaccgcgggatcgagccgaccctgcccaactggttcgcggtgaccaagacgcgtaatggcgccggaggggggaacaaggtggtggacgagtgctacatccccaactacctcctgcccaagactcagcccgagctgcagtgggcgtggactaacatggaggagtatataagcgcctgtttgaacctggccgagcgcaaacggctcgtggcgcagcacctgacccacgtcagccagacccaggagcagaacaaggagaatctgaaccccaattctgacgcgcctgtcatccggtcaaaaacctccgcgcgctacatggagctggtcgggtggctggtggaccggggcatcacctccgagaagcagtggatccaggaggaccaggcctcgtacatctccttcaacgccgcttccaactcgcggtcccagatcaaggccgctctggacaatgccggcaagatcatggcgctgaccaaatccgcgcccgactacctggtaggccccgctccgcccgcggacattaaaaccaaccgcatctaccgcatcctggagctgaacggctacgaacctgcctacgccggctccgtctttctcggctgggcccagaaaaggttcgggaagcgcaacaccatctggctgtttgggccggccaccacgggcaagaccaacatcgcggaagccatcgcccacgccgtgcccttctacggctgcgtcaactggaccaatgagaactttcccttcaatgattgcgtcgacaagatggtgatctggtgggaggagggcaagatgacggccaaggtcgtggagtccgccaaggccattctcggcggcagcaaggtgcgcgtggaccaaaagtgcaagtcgtccgcccagatcgaccccacccccgtgatcgtcacctccaacaccaacatgtgcgccgtgattgacgggaacagcaccaccttcgagcaccagcagccgttgcaggaccggatgttcaaatttgaactcacccgccgtctggagcatgactttggcaaggtgacaaagcaggaagtcaaagagttcttccgctgggcgcaggatcacgtgaccgaggtggcgcatgagttctacgtcagaaagggtggagccaacaaaagacccgcccccgatgacgcggataaaagcgagcccaagcgggcctgcccctcagtcgcggatccatcgacgtcagacgcggaaggagctccggtggactttgccgacaggtaccaaaacaaatgttctcgtcacgcgggcatgcttcagatgctgtttccctgcaagacatgcgagagaatgaatcagaatttcaacatttgcttcacgcacgggacgagagactgttcagagtgcttccccggcgtgtcagaatctcaaccggtcgtcagaaagaggacgtatcggaaactctgtgccattcatcatctgctggggcgggctcccgagattgcttgctcggcctgcgatctggtcaacgtggacctggatgactgtgtttctgagcaataaatgacttaaaccaggtatggctgccgatggttatcttccagattggctcgaggacaacctctctgagggcattcgcgagtggtgggacttgaaacctggagccccgaagcccaaagccaaccagcaaaagcaggacgacggccggggtctggtgcttcctggctacaagtacctcggacccttcaacggactcgacaagggggagcccgtcaacgcggcggacgcagcggccctcgagcacgacaaggcctacgaccagcagctcaaagcgggtgacaatccgtacctgcggtataaccacgccgacgccgagtttcaggagcgtctgcaagaagatacgtcttttgggggcaacctcgggcgagcagtcttccaggccaagaagcgggttctcgaacctctcggtctggttgaggaaggcgctaagacggctcctggaaagaaacgtccggtagagcagtcgccacaagagccagactcctcctcgggcatcggcaagacaggccagcagcccgctaaaaagagactcaattttggtcagactggcgactcagagtcagtccccgatccacaacctctcggagaacctccagcaacccccgctgctgtgggacctactacaatggcttcaggcggtggcgcaccaatggcagacaataacgaaggcgccgacggagtgggtaatgcctcaggaaattggcattgcgattccacatggctgggcgacagagtcatcaccaccagcacccgcacctgggccttgcccacctacaataaccacctctacaagcaaatctccagtgcttcaacgggggccagcaacgacaaccactacttcggctacagcaccccctgggggtattttgatttcaacagattccactgccacttttcaccacgtgactggcagcgactcatcaacaacaattggggattccggcccaagagactcaacttcaaactcttcaacatccaagtcaaggaggtcacgacgaatgatggcgtcacaaccatcgctaataaccttaccagcacggttcaagtcttctcggactcggagtaccagcttccgtacgtcctcggctctgcgcaccagggctgcctccctccgttcccggcggacgtgttcatgattccgcaatacggctacctgacgctcaacaatggcagccaagccgtgggacgttcatccttttactgcctggaatatttcccttctcagatgctgagaacgggcaacaactttaccttcagctacacctttgaggaagtgcctttccacagcagctacgcgcacagccagagcctggaccggctgatgaatcctctcatcgaccaatacctgtattacctgaacagaactcaaaatcagtccggaagtgcccaaaacaaggacttgctgtttagccgtgggtctccagctggcatgtctgttcagcccaaaaactggctacctggaccctgttatcggcagcagcgcgtttctaaaacaaaaacagacaacaacaacagcaattttacctggactggtgcttcaaaatataacctcaatgggcgtgaatccatcatcaaccctggcactgctatggcctcacacaaagacgacgaagacaagttctttcccatgagcggtgtcatgatttttggaaaagagagcgccggagcttcaaacactgcattggacaatgtcatgattacagacgaagaggaaattaaagccactaaccctgtggccaccgaaagatttgggaccgtggcagtcaatttccagagcagcagcacagaccctgcgaccggagatgtgcatgctatgggagcattacctggcatggtgtggcaagatagagacgtgtacctgcagggtcccatttgggccaaaattcctcacacagatggacactttcacccgtctcctcttatgggcggctttggactcaagaacccgcctcctcagatcctcatcaaaaacacgcctgttcctgcgaatcctccggcggagttttcagctacaaagtttgcttcattcatcacccaatactccacaggacaagtgagtgtggaaattgaatgggagctgcagaaagaaaacagcaagcgctggaatcccgaagtgcagtacacatccaattatgcaaaatctgccaacgttgattttactgtggacaacaatggactttatactgagcctcgccccattggcacccgttaccttacccgtcccctgtaattacgtgttaatcaataaaccggttgattcgtttcagttgaactttggtctcctgtccttcttatcttatcggttaccatggttatagcttacacattaactgcttggttgcgcttcgcgataaaagacttacgtcatcgggttacccctagtgatggagttgcccactccctctctgcgcgctcgctcgctcggtggggcctgcggaccaaaggtccgcagacggcagagctctgctctgccggccccaccgagcgagcgagcgcgcagagagggagtgggcaa

SEQ ID NO: 2392 - DNA, 3131 bp, Artificial Sequence
  Synthetic polynucleotide
gcggccgcgaattcgcccttggctgcgtcaactggaccaatgagaactttcccttcaatgattgcgtcgacaagatggtgatctggtgggaggagggcaagatgacggccaaggtcgtggagtccgccaaggccattctcggcggcagcaaggtgcgcgtggaccaaaagtgcaagtcgtccgcccagatcgaccccacccccgtgatcgtcacctccaacaccaacatgtgcgccgtgattgacgggaacagcaccaccttcgagcaccagcagcctctccaggaccggatgtttaagttcgaactcacccgccgtctggagcacgactttggcaaggtgacaaagcaggaagtcaaagagttcttccgctgggccagtgatcacgtgaccgaggtggcgcatgagttttacgtcagaaagggcggagccagcaaaagacccgcccccgatgacgcggataaaagcgagcccaagcgggcctgcccctcagtcgcggatccatcgacgtcagacgcggaaggagctccggtggactttgccgacaggtaccaaaacaaatgttctcgtcacgcgggcatgcttcagatgctgtttccctgcaaaacgtgcgagagaatgaatcggaatttcaacatttgcttcacacacggggtcagagactgctcagagtgtttccccggcgtgtcagaatctcaaccggtcgtcagaaagaggacgtatcggaaactccgtgcgattcatcatctgctggggcgggctcccgagattgcttgctcggcctgcgatctggtcaacgtggacctggatgactgtgtttctgagcaataaatgacttaaaccaggtatggctgccgatggttatcttccagattggctcgaggacaacctctctgagggcattcgcgagtggtgggcgctgaaacctggagccccgaagcccaaagccaaccagcaaaagcaggacgacggccggggtctggtgcttcctggctacaagtacctcggacccttcaacggactcgacaagggggagcccgtcaacgcggcggacgcagcggccctcgagcacgacaaggcttacgaccagcagctgcaggcgggtgacaatccgtacctgcggtataaccacgccgacgccgagtttcaggagcgtctgcaagaagatacgtcttttgggggcaacctcgggcgagcagtcttccaggccaagaagcgggttctcgaacctctcggtctggttgaggaaggcgctaagacggctcctggaaagaagagaccggtagagccatcaccccagcgttctccagactcctctacgggcatcggcaagaaaggccaacagcccgccagaaaaagactcaattttggtcagactggcgactcagagtcagttccagaccctcaacctctcggagaacctccagcagcgccctctggtgtgggacctaatacaatggctgcaggcggtggcgcaccaatggcagacaataacgaaggcgccgacggagtgggtagttcctcgggaaattggcattgcgattccacatggctgggcgacagagtcatcaccaccagcacccgaacctgggccctgcccacctacaacaaccacctctacaagcaaatctccaacgggacatcgggaggagccaccaacgacaacacctacttcggctacagcaccccctgggggtattttgactttaacagattccactgccacctttcaccacgtgactggcagcgactcatcaacaacaactggggattccgacccaagagactcagcttcaagctcttcaacatccaggtcaaggaggtcacgcagaatgaaggcaccaagaccatcgccaataacctcaccagcaccatccaggtgtttacggactcggagtaccagctgccgtacgttctcggctctgtccaccagggctgcctgcctccgttcccggcggacgtgttcatgattccccagtacggctacctaacactcaacaacggtagtcaggccgtgggacgctcctccttctactgcctggaatactttccttcgcagatgctgagaaccggcaacaacttccagtttacttacaccttcgaggacgtgcctttccacagcagctacgcccacagctagagcttggaccggctgatgaatcctctgattgaccagtacctgtactacttgtctcggactcaaacaacaggaggcacggcaaatacgcagactctgggcttcagccaaggtgggcctaatacaatggccaatcaggcaaagaactggctgccaggaccctgttaccgccaacaacgcgtctcaacgacaaccgggcaaaacaacaatagcaactttgcctggactgctgggaccaaataccatctgaatggaagaaattcattggctaatcctggcatcgctatggcaacacacaaagacgacgaggagcgtttttttcccagtaacgggatcctgatttttggcaaacaaaatgctgccagagacaatgcggattacagcgatgtcatgctcaccagcgaggaagaaatcaaaaccactaaccctgtggctacagaggaatacggtatcgtggcagataacttgcagcagcaaaacacggctcctcaaattggaactgtcaacagccagggggccttacccggtatggtctggcagaaccgggacgtgtacctgcagggtcccatctgggccaagattcctcacacggacggcaacttccacccgtctccgctgatgggcggctttggcctgaaacatcctccgcctcagatcctgatcaagaacacgcctgtacctgcggatcctccgaccaccttcaaccagtcaaagctgaactctttcatcacgcaatacagcaccggacaggtcagcgtggaaattgaatgggagctgcagaaggaaaacagcaagcgctggaaccccgagatccagtacacctccaactactacaaatctataagtgtggactttgctgttaatacagaaggcgtgtactctgaaccccgccccattggcacccgttacctcacccgtaatctgtaattgcctgttaatcaataaaccggttgattcgtttcagttgaactttggtctctgcgaagggcgaattc

SEQ ID NO: 2393 - DNA, 255 bp, Adeno-associated virus serotype 10
ggtaattcctccggaaattggcattgcgattccacatggctgggcgacagagtcatcaccaccagcacccgaacctgggtcctgcccacctacaacaaccacatctacaagcaaatctccagcgagacaggagccaccaacgacaaccactacttcggctacagcaccccctgggggtattttgactttaacagattccactgccacttttcaccacgtgactggcagcgactcatcaacaacaactggggattc

SEQ ID NO: 2394 - protein, 738 aa, Adeno-associated virus serotype 10
MAADGYLPDWLEDNLSEGIREWWDLKPGAPKPKANQQKQDDGRGLVLPGYKYLGPFNGLDKGEPVNAADAAALEHDKAYDQQLKAGDNPYLRYNHADAEFQERLQEDTSFGGNLGRAVFQAKKRVLEPLGLVEEAAKTAPGKKRPVEPSPQRSPDSSTGIGKKGQQPAKKRLNFGQTGESESVPDPQPIGEPPAGPSGLGSGTMAAGGGAPMADNNEGADGVGSSSGNWHCDSTWLGDRVITTSTRTWALPTYNNHLYKQISNGTSGGSTNDNTYFGYSTPWGYFDFNRFHCHFSPRDWQRLINNNWGFRPKRLSFKLFNIQVKEVTQNEGTKTIANNLTSTIQVFTDSEYQLPYVLGSAHQGCLPPFPADVFMIPQYGYLTLNNGSQAVGRSSFYCLEYFPSQMLRTGNNFEFSYTFEDVPFHSSYAHSQSLDRLMNPLIDQYLYYLSRTQSTGGTQGTQQLLFSQAGPANMSAQAKNWLPGPCYRQQRVSTTLSQNNNSNFAWTGATKYHLNGRDSLVNPGVAMATHKDDEERFFPSSGVLMFGKQGAGRDNVDYSSVMLTSEEEIKTTNPVATEQYGVVADNLQQANTGPIVGNVNSQGALPGMVWQNRDVYLQGPIWAKIPHTDGNFHPSPLMGGFGLKHPPPQILIKNTPVPADPPTTFSQAKLASFITQYSTGQVSVEIEWELQKENSKRWNPEIQYTSNYYKSTNVDFAVNTEGTYSEPRPIGTRYLTRNL

SEQ ID NO: 2395 - protein, 738 aa, Adeno-associated virus 10
MAADGYLPDWLEDNLSEGIREWWDLKPGAPKPKANQQKQDDGRGLVLPGYKYLGPFNGLDKGEPVNAADAAALEHDKAYDQQLKAGDNPYLRYNHADAEFQERLQEDTSFGGNLGRAVFQAKKRVLEPLGLVEEGAKTAPGKKRPVEPSPQRSPDSSTGIGKKGQQPAKKRLNFGQTGDSESVPDPQPIGEPPAGPSGLGSGTMAAGGGAPMADNNEGADGVGSSSGNWHCDSTWLGDRVITTSTRTWALPTYNNHLYKQISNGTSGGSTNDNTYFGYSTPWGYFDFNRFHCHFSPRDWQRLINNNWGFRPKRLNFKLFNIQVKEVTQNEGTKTIANNLTSTIQVFTDSEYQLPYVLGSAHQGCLPPFPADVFMIPQYGYLTLNNGSQAVGRSSFYCLEYFPSQMLRTGNNFEFSYQFEDVPFHSSYAHSQSLDRLMNPLIDQYLYYLSRTQSTGGTAGTQQLLFSQAGPNNMSAQAKNWLPGPCYRQQRVSTTLSQNNNSNFAWTGATKYHLNGRDSLVNPGVAMATHKDDEERFFPSSGVLMFGKQGAGKDNVDYSSVMLTSEEEIKTTNPVATEQYGVVADNLQQQNAAPIVGAVNSQGALPGMVWQNRDVYLQGPIWAKIPHTDGNFHPSPLMGGFGLKHPPPQILIKNTPVPADPPTTFSQAKLASFITQYSTGQVSVEIEWELQKENSKRWNPEIQYTSNYYKSTNVDFAVNTDGTYSEPRPIGTRYLTRNL

SEQ ID NO: 2396 - DNA, 258 bp, Adeno-associated virus serotype 11
ggtaattcctccggaaattggcattgcgattccacatggctgggcgacagagtcatcaccaccagcacccgaacctgggccctgccaacctacaacaaccacctctacaaacaaatctccagcgcttcaacgggggccagcaacgacaaccactactttggctacagcaccccctgggggtattttgactttaacagattccactgccacttctcaccacgtgactggcagcgactcatcaacaacaactggggattc

SEQ ID NO: 2397 - DNA, 255 bp, Adeno-associated virus serotype 12
ggtaattcctccggaaattggcattgcgattccacatggctgggcgaccgagtcattaccaccagcacccggacttgggccctgcccacctacaacaaccacctctacaagcaaatctccagccaatcgggtgccaccaacgacaaccactacttcggctacagcaccccttgggggtattttgatttcaacagattccactgccatttctcaccacgtgactggcagcgactcatcaacaacaactggggattc

SEQ ID NO: 2398 - DNA, 2208 bp, Adeno-associated virus serotype 2
atggctgccgatggttatcttccagattggctcgaggacactctctctgaaggaataagacagtggtggaagctcaaacctggcccaccaccaccaaagcccgcagagcggcataaggacgacagcaggggtcttgtgcttcctgggtacaagtacctcggacccttcaacggactcgacaagggagagccggtcaacgaggcagacgccgcggccctcgagcacgacaaagcctacgaccggcagctcgacagcggagacaacccgtacctcaagtacaaccacgccgacgcggagtttcaggagcgccttaaagaagatacgtcttttgggggcaacctcggacgagcagtcttccaggcgaaaaagagggttcttgaacctctgggcctggttgaggaacctgttaagacggctccgggaaaaaagaggccggtagagcactctcctgtggagccagactcctcctcgggaaccggaaaggcgggccagcagcctgcaagaaaaagattgaattttggtcagactggagacgcagactcagtacctgacccccagcctctcggacagccaccagcagccccctctggtctgggaactaatacgatggctacaggcagtggcgcaccaatggcagacaataacgagggcgccgacggagtgggtaattcctcgggaaattggcattgcgattccacatggatgggcgacagagtcatcaccaccagcacccgaacctgggccctgcccacctacaacaaccacctctacaaacaaatttccagccaatcaggagcctcgaacgacaatcactactttggctacagcaccccttgggggtattttgacttcaacagattccactgccacttttcaccacgtgactggcaaagactcatcaacaacaactggggattccgacccaagagactcaacttcaagctctttaacattcaagtcaaagaggtcacgcagaatgacggtacgacgacgattgccaataaccttaccagcacggttcaggtgtttactgactcggagtaccagctcccgtacgtcctcggctcggcgcatcaaggatgcctcccgccgttcccagcagacgtcttcatggtgccacagtatggatacctcaccctgaacaacgggagtcaggcagtaggacgctcttcattttactgcctggagtactttccttctcagatgctgcgtaccggaaacaactttaccttcagctacacttttgaggacgttcctttccacagcagctacgctcacagccagagtctggaccgtctcatgaatcctctcatcgaccagtacctgtattacttgagcagaacaaacactccaagtggaaccaccacgcagtcaaggcttcagttttctcaggccggagcgagtgacattcgggaccagtctaggaactggcttcctggaccctgttaccgccagcagcgagtatcaaagacatctgcggataacaacaacagtgaatactcgtggactggagctaccaagtaccacctcaatggcagagactctctggtgaatccgggcccggccatggcaagccacaaggacgatgaagaaaagttttttcctcagagcggggttctcatctttgggaagcaaggctcagagaaaacaaatgtggacattgaaaaggtcatgattacagacgaagaggaaatcaggacaaccaatcccgtggctacggagcagtatggttctgtatctaccaacctccagagaggcaacagacaagcagctaccgcagatgtcaacacacaaggcgttcttccaggcatggtctggcaggacagagatgtgtaccttcaggggcccatctgggcaaagattccacacacggacggacattttcacccctctcccctcatgggtggattcggacttaaacaccctcctccacagattctcatcaagaacaccccggtacctgcgaatccttcgaccaccttcagtgcggcaaagtttgcttccttcatcacacagtactccacgggacaggtcagcgtggagatcgagtgggagctgcagaaggaaaacagcaaacgctggaatcccgaaattcagtacacttccaactacaacaagtctgttaatgtggactttactgtggacactaatggcgtgtattcagagcctcgccccattggcaccagatacctgactcgtaatctgtaa

SEQ ID NO: 2399 - protein, 735 aa, Adeno-associated virus 2 [sequence omitted]

SEQ ID NO: 2400 - protein, 621 aa, Adeno-associated virus 2
MPGFYEIVIKVPSDLDGHLPGISDSFVNWVAEKEWELPPDSDMDLNLIEQAPLTVAEKLQRDFLTEWRRVSKAPEALFFVQFEKGESYFHMHVLVETTGVKSMVLGRFLSQIREKLIQRIYRGIEPTLPNWFAVTKTRNGAGGGNKVVDECYIPNYLLPKTQPELQWAWTNMEQYLSACLNLTERKRLVAQHLTHVSQTQEQNKENQNPNSDAPVIRSKTSARYMELVGWLVDKGITSEKQWIQEDQASYISFNAASNSRSQIKAALDNAGKIMSLTKTAPDYLVGQQPVEDISSNRIYKILELNGYDPQYAASVFLGWATKKFGKRNTIWLFGPATTGKTNIAEAIAHTVPFYGCVNWTNENFPFNDCVDKMVIWWEEGKMTAKVVESAKAILGGSKVRVDQKCKSSAQIDPTPVIVTSNTNMCAVIDGNSTTFEHQQPLQDRMFKFELTRRLDHDFGKVTKQEVKDFFRWAKDHVVEVEHEFYVKKGGAKKRPAPSDADISEPKRVRESVAQPSTSDAEASINYADRYQNKCSRHVGMNLMLFPCRQCERMNQNSNICFTHGQKDCLECFPVSESQPVSVVKKAYQKLCYIHHIMGKVPDACTACDLVNVDLDDCIFEQ

SEQ ID NO: 2401 - DNA, 4675 bp, Adeno-associated virus serotype 2
ttggccactccctctctgcgcgctcgctcgctcactgaggccgggcgaccaaaggtcgcccgacgcccgggctttgcccgggcggcctcagtgagcgagcgagcgcgcagagagggagtggccaactccatcactaggggttcctggaggggtggagtcgtgacgtgaattacgtcatagggttagggaggtcctgtattagaggtcacgtgagtgttttgcgacattttgcgacaccatgtggtcacgctgggtatttaagcccgagtgagcacgcagggtctccattttgaagcgggaggtttgaacgcgcagccgccatgccggggttttacgagattgtgattaaggtccccagcgaccttgacgggcatctgcccggcatttctgacagctttgtgaactgggtggccgagaaggaatgggagttgccgccagattctgacatggatctgaatctgattgagcaggcacccctgaccgtggccgagaagctgcagcgcgactttctgacggaatggcgccgtgtgagtaaggccccggaggcccttttctttgtgcaatttgagaagggagagagctacttccacatgcacgtgctcgtggaaaccaccggggtgaaatccatggttttgggacgtttcctgagtcagattcgcgaaaaactgattcagagaatttaccgcgggatcgagccgactttgccaaactggttcgcggtcacaaagaccagaaatggcgccggaggcgggaacaaggtggtggatgagtgctacatccccaattacttgctccccaaaacccagcctgagctccagtgggcgtggactaatatggaacagtatttaagcgcctgtttgaatctcacggagcgtaaacggttggtggcgcagcatctgacgcacgtgtcgcagacgcaggagcagaacaaagagaatcagaatcccaattctgatgcgccggtgatcagatcaaaaacttcagccaggtacatggagctggtcgggtggctcgtggacaaggggattacctcggagaagcagtggatccaggaggaccaggcctcatacatctccttcaatgcggcctccaactcgcggtcccaaatcaaggctgccttggacaatgcgggaaagattatgagcctgactaaaaccgcccccgactacctggtgggccagcagcccgtggaggacatttccagcaatcggatttataaaattttggaactaaacgggtacgatccccaatatgcggcttccgtctttctgggatgggccacgaaaaagttcggcaagaggaacaccatctggctgtttgggcctgcaactaccgggaagaccaacatcgcggaggccatagcccacactgtgcccttctacgggtgcgtaaactggaccaatgagaactttcccttcaacgactgtgtcgacaagatggtgatctggtgggaggaggggaagatgaccgccaaggtcgtggagtcggccaaagccattctcggaggaagcaaggtgcgcgtggaccagaaatgcaagtcctcggcccagatagacccgactcccgtgatcgtcacctccaacaccaacatgtgcgccgtgattgacgggaactcaacgaccttcgaacaccagcagccgttgcaagaccggatgttcaaatttgaactcacccgccgtctggatcatgactttgggaaggtcaccaagcaggaagtcaaagactttttccggtgggcaaaggatcacgtggttgaggtggagcatgaattctacgtcaaaaagggtggagccaagaaaagacccgcccccagtgacgcagatataagtgagcccaaacgggtgcgcgagtcagttgcgcagccatcgacgtcagacgcggaagcttcgatcaactacgcagacaggtaccaaaacaaatgttctcgtcacgtgggcatgaatctgatgctgtttccctgcagacaatgcgagagaatgaatcagaattcaaatatctgcttcactcacggacagaaagactgtttagagtgctttcccgtgtcagaatctcaacccgtttctgtcgtcaaaaaggcgtatcagaaactgtgctacattcatcatatcatgggaaaggtgccagacgcttgcactgcctgcgatctggtcaatgtggatttggatgactgcatctttgaacaataaatgatttaaatcaggtatggctgccgatggttatcttccagattggctcgaggacactctctctgaaggaataagacagtggtggaagctcaaacctggcccaccaccaccaaagcccgcagagcggcataaggacgacagcaggggtcttgtgcttcctgggtacaagtacctcggacccttcaacggactcgacaagggagagccggtcaacgaggcagacgccgcggccctcgagcacgtacaaagcctacgaccggcagctcgacagcggagacaacccgtacctcaagtacaaccacgccgacgcggagtttcaggagcgccttaaagaagatacgtcttttgggggcaacctcggacgagcagtcttccaggcgaaaaagagggttcttgaacctctgggcctggttgaggaacctgttaagacggctccgggaaaaaagaggccggtagagcactctcctgtggagccagactcctcctcgggaaccggaaaggcgggccagcagcctgcaagaaaaagattgaattttggtcagactggagacgcagactcagtacctgacccccagcctctcggacagccaccagcagccccctctggtctgggaactaatacgatggctacaggcagtggcgcaccaatggcagacaataacgagggcgccgacggagtgggtaattcctccggaaattggcattgcgattccacatggatgggcgacagagtcatcaccaccagcacccgaacctgggccctgcccacctacaacaaccacctctacaaacaaatttccagccaatcaggagcctcgaacgacaatcactactttggctacagcaccccttgggggtattttgacttcaacagattccactgccacttttcaccacgtgactggcaaagactcatcaacaacaactggggattccgacccaagagactcaacttcaagctctttaacattcaagtcaaagaggtcacgcagaatgacggtacgacgacgattgccaataaccttaccagcacggttcaggtgtttactgactcggagtaccagctcccgtacgtcctcggctcggcgcatcaaggatgcctcccgccgttcccagcagacgtcttcatggtgccacagtatggatacctcaccctgaacaacgggagtcaggcagtaggacgctcttcattttactgcctggagtactttccttctcagatgctgcgtaccggaaacaactttaccttcagctacacttttgaggacgttcctttccacagcagctacgctcacagccagagtctggaccgtctcatgaatcctctcatcgaccagtacctgtattacttgagcagaacaaacactccaagtggaaccaccacgcagtcaaggcttcagttttctcaggccggagcgagtgacattcgggaccagtctaggaactggcttcctggaccctgttaccgccagcagcgagtatcaaagacatctgcggataacaacaacagtgaatactcgtggactggagctaccaagtaccacctcaatggcagagactctctggtgaatccggccatggcaagccacaaggacgatgaagaaaagttttttcctcagagcggggttctcatctttgggaagcaaggctcagagaaaacaaatgtgaacattgaaaaggtcatgattacagacgaagaggaaatcggaacaaccaatcccgtggctacggagcagtatggttctgtatctaccaacctccagagaggcaacagacaagcagctaccgcagatgtcaacacacaaggcgttcttccaggcatggtctggcaggacagagatgtgtaccttcaggggcccatctgggcaaagattccacacacggacggacattttcacccctctcccctcatgggtggattcggacttaaacaccctcctccacagattctcatcaagaacaccccggtacctgcgaatccttcgaccaccttcagtgcggcaaagtttgcttccttcatcacacagtactccacgggacacggtcagcgtggagatcgagtgggagctgcagaaggaaaacagcaaacgctggaatcccgaaattcagtacacttccaactacaacaagtctgttaatcgtggacttaccgtggatactaatggcgtgtattcagagcctcgccccattggcaccagatacctgactcgtaatctgtaattgcttgttaatcaataaaccgtttaattcgtttcagttgaactttggtctctgcgtatttctttcttatctagtttccatggctacgtagataagtagcatggcgggttaatcattaactacaaggaacccctagtgatggagttggccactccctctctgcgcgctcgctcgctcactgaggccgggcgaccaaaggtcgcccgacgcccgggctttgcccgggcggcctcagtgagcgagcgagcgcgcagagagggagtggccaa

SEQ ID NO: 2402 - DNA, 4679 bp, Adeno-associated virus 2
ttggccactccctctctgcgcgctcgctcgctcactgaggccgggcgaccaaaggtcgcccgacgcccgggctttgcccgggcggcctcagtgagcgagcgagcgcgcagagagggagtggccaactccatcactaggggttcctggaggggtggagtcgtgacgtgaattacgtcatagggttagggaggtcctgtattagaggtcacgtgagtgttttgcgacattttgcgacaccatgtggtcacgctgggtatttaagcccgagtgagcacgcagggtctccattttgaagcgggaggtttgaacgcgcagccgccatgccggggttttacgagattgtgattaaggtccccagcgaccttgacgggcatctgcccggcatttctgacagctttgtgaactgggtggccgagaaggaatgggagttgccgccagattctgacatggatctgaatctgattgagcaggcacccctgaccgtggccgagaagctgcagcgcgactttctgacggaatggcgccgtgtgagtaaggccccggaggcccttttctttgtgcaatttgagaagggagagagctacttccacatgcacgtgctcgtggaaaccaccggggtgaaatccatggttttgggacgtttcctgagtcagattcgcgaaaaactgattcagagaatttaccgcgggatcgagccgactttgccaaactggttcgcggtcacaaagaccagaaatggcgccggaggcgggaacaaggtggtggatgagtgctacatccccaattacttgctccccaaaacccagcctgagctccagtgggcgtggactaatatggaacagtatttaagcgcctgtttgaatctcacggagcgtaaacggttggtggcgcagcatctgacgcacgtgtcgcagacgcaggagcagaacaaagagaatcagaatcccaattctgatgcgccggtgatcagatcaaaaacttcagccaggtacatggagctggtcgggtggctcgtggacaaggggattacctcggagaagcagtggatccaggaggaccaggcctcatacatctccttcaatgcggcctccaactcgcggtcccaaatcaaggctgccttggacaatgcgggaaagattatgagcctgactaaaaccgcccccgactacctggtgggccagcagcccgtggaggacatttccagcaatcggatttataaaattttggaactaaacgggtacgatccccaatatgcggcttccgtctttctgggatgggccacgaaaaagttcggcaagaggaacaccatctggctgtttgggcctgcaactaccgggaagaccaacatcgcggaggccatagcccacactgtgcccttctacgggtgcgtaaactggaccaatgagaactttcccttcaacgactgtgtcgacaagatggtgatctggtgggaggaggggaagatgaccgccaaggtcgtggagtcggccaaagccattctcggaggaagcaaggtgcgcgtggaccagaaatgcaagtcctcggcccagatagacccgactcccgtgatcgtcacctccaacaccaacatgtgcgccgtgattgacgggaactcaacgaccttcgaacaccagcagccgttgcaagaccggatgttcaaatttgaactcacccgccgtctggatcatgactttgggaaggtcaccaagcaggaagtcaaagactttttccggtgggcaaaggatcacgtggttgaggtggagcatgaattctacgtcaaaaagggtggagccaagaaaagacccgcccccagtgacgcagatataagtgagcccaaacgggtgcgcgagtcagttgcgcagccatcgacgtcagacgcggaagcttcgatcaactacgcagacaggtaccaaaacaaatgttctcgtcacgtgggcatgaatctgatgctgtttccctgcagacaatgcgagagaatgaatcagaattcaaatatctgcttcactcacggacagaaagactgtttagagtgctttcccgtgtcagaatctcaacccgtttctgtcgtcaaaaaggcgtatcagaaactgtgctacattcatcatatcatgggaaaggtgccagacgcttgcactgcctgcgatctggtcaatgtggatttggatgactgcatctttgaacaataaatgatttaaatcaggtatggctgccgatggttatcttccagattggctcgaggacactctctctgaaggaataagacagtggtggaagctcaaacctggcccaccaccaccaaagcccgcagagcggcataaggacgacagcaggggtcttgtgcttcctgggtacaagtacctcggacccttcaacggactcgacaagggagagccggtcaacgaggcagacgccgcggccctcgagcacgacaaagcctacgaccggcagctcgacagcggagacaacccgtacctcaagtacaaccacgccgacgcggagtttcaggagcgccttaaagaagatacgtcttttgggggcaacctcggacgagcagtcttccaggcgaaaaagagggttcttgaacctctgggcctggttgaggaacctgttaagacggctccgggaaaaaagaggccggtagagcactctcctgtggagccagactcctcctcgggaaccggaaaggcgggccagcagcctgcaagaaaaagattgaattttggtcagactggagacgcagactcagtacctgacccccagcctctcggacagccaccagcagccccctctggtctgggaactaatacgatggctacaggcagtggcgcaccaatggcagacaataacgagggcgccgacggagtgggtaattcctccggaaattggcattgcgattccacatggatgggcgacagagtcatcaccaccagcacccgaacctgggccctgcccacctacaacaaccacctctacaaacaaatttccagccaatcaggagcctcgaacgacaatcactactttggctacagcaccccttgggggtattttgacttcaacagattccactgccacttttcaccacgtgactggcaaagactcatcaacaacaactggggattccgacccaagagactcaacttcaagctctttaacattcaagtcaaagaggtcacgcagaatgacggtacgacgacgattgccaataaccttaccagcacggttcaggtgtttactgactcggagtaccagctcccgtacgtcctcggctcggcgcatcaaggatgcctcccgccgttcccagcagacgtcttcatggtgccacagtatggatacctcaccctgaacaacgggagtcaggcagtaggacgctcttcattttactgcctggagtactttccttctcagatgctgcgtaccggaaacaactttaccttcagctacacttttgaggacgttcctttccacagcagctacgctcacagccagagtctggaccgtctcatgaatcctctcatcgaccagtacctgtattacttgagcagaacaaacactccaagtggaaccaccacgcagtcaaggcttcagttttctcaggccggagcgagtgacattcgggaccagtctaggaactggcttcctggaccctgttaccgccagcagcgagtatcaaagacatctgcggataacaacaacagtgaatactcgtggactggagctaccaagtaccacctcaatggcagagactctctggtgaatccgggcccggccatggcaagccacaaggacgatgaagaaaagttttttcctcagagcggggttctcatctttgggaagcaaggctcagagaaaacaaatgtggacattgaaaaggtcatgattacagacgaagaggaaatcaggacaaccaatcccgtggctacggagcagtatggttctgtatctaccaacctccagagaggcaacagacaagcagctaccgcagatgtcaacacacaaggcgttcttccaggcatggtctggcaggacagagatgtgtaccttcaggggcccatctgggcaaagattccacacacggacggacattttcacccctctcccctcatgggtggattcggacttaaacaccctcctccacagattctcatcaagaacaccccggtacctgcgaatccttcgaccaccttcagtgcggcaaagtttgcttccttcatcacacagtactccacgggacaggtcagcgtggagatcgagtgggagctgcagaaggaaaacagcaaacgctggaatcccgaaattcagtacacttccaactacaacaagtctgttaatgtggactttactgtggacactaatggcgtgtattcagagcctcgccccattggcaccagatacctgactcgtaatctgtaattgcttgttaatcaataaaccgtttaattcgtttcagttgaactttggtctctgcgtatttctttcttatctagtttccatggctacgtagataagtagcatggcgggttaatcattaactacaaggaacccctagtgatggagttggccactccctctctgcgcgctcgctcgctcactgaggccgggcgaccaaaggtcgcccgacgcccgggctttgcccgggcggcctcagtgagcgagcgagcgcgcagagagggagtggccaa

SEQ ID NO: 2403 - protein, 725 aa, Adeno-associated virus 5
MAADGYLPDWLEDTLSEGIRQWWKLKPGPPPPKPAERHKDDSRGLVLPGYKYLGPFNGLDKGEPVNEADAAALEHDKAYDRQLDSGDNPYLKYNHADAEFQERLKEDTSFGGNLGRAVFQAKKRVLEPFGLVEEGAKTAPTGKRIDDHFPKRKKARTEEDSKPSTSSDAEAGPSGSQQLQIPAQPASSLGADTMSAGGGGPLGDNNQGADGVGNASGDWHCDSTWMGDRVVTKSTRTWVLPSYNNHQYREIKSGSVDGSNANAYFGYSTPWGYFDFNRFHSHWSPRDWQRLINNYWGFRPRSLRVKIFNIQVKEVTVQDSTTTIANNLTSTVQVFTDDDYQLPYVVGNGTEGCLPAFPPQVFTLPQYGYATLNRDNTENPTERSSFFCLEYFPSKMLRTGNNFEFTYNFEEVPFHSSFAPSQNLFKLANPLVDQYLYRFVSTNNTGGVQFNKNLAGRYANTYKNWFPGPMGRTQGWNLGSGVNRASVSAFATTNRMELEGASYQVPPQPNGMTNNLQGSNTYALENTMIFNSQPANPGTTATYLEGNMLITSESETQPVNRVAYNVGGQMATNNQSSTTAPTTGTYNLQEIVPGSVWMERDVYLQGPIWAKIPETGAHFHPSPAMGGFGLKHPPPMMLIKNTPVPGNITSFSDVPVSSFITQYSTGQVTVEMEWELKKENSKRWNPEIQYTNNYNDPQFVDFAPDSTGEYRTTRPIGTRYLTRPL

SEQ ID NO: 2404 - protein, 644 aa, Artificial Sequence
  Synthetic polypeptide
  MOD_RES (434)..(434): Any naturally occurring amino acid
KAYDQQLKAGDNPYLRYNHADAEFQERLQEDTSFGGNLGRAVFQAKKRVLEPLGLVETPAKTAPGKKRPVDSPDSTSGIGKKGQQPAKKRLNFGQTGDSESVPDPQPIGEPPAGPSGLGSGTMAAGGGAPMADNNEGADGVGNASGNWHCDSTWLGDRVITTSTRTWALPTYNNHLYKQISSQSAGSTNDNVYFGYSTPWGYFDFNRFHCHFSPRDWQRLINNNWGFRPKKLNFKLFNIQVKEVTTNDGVTTIANNLTSTVQVFSDSEYQLPYVLGSAHQGCLPPFPADVFMIPQYGYLTLNNGSQSVGRSSFYCLEYFPSQMLRTGNNFTFSYTFEDVPFHSSYAHSQSLDRLMNPLIDQYLYYLARTQSNAGGTAGNRELQFYQGGPTTMAEQAKNWLPGPCFRQQRVSKTLDQNNNSNFAWTGATKYHLNXRNSLVNPGVAMATHKDDEERFFPSSGVLIFGKTGAANKTTLENVLMTNEEEIRPTNPVATEEYGIVSSNLQAASTAAQTQVVNNQGALPGMVWQNRDVYLQGPIWAKIPHTDGNFHPSPLMGGFGLKHPPPQILIKNTPVPANPPEVFTPAKFASFITQYSTGQVSVEIEWELQKENSKRWNPEIQYTSNFDKQTGVDFAVDSQGVYSEP

SEQ ID NO: 2405 - DNA, 1933 bp, Artificial Sequence
  Synthetic polynucleotide
caaggcctacgaccagcagctcaaagcgggtgacaatccgtacctgcggtataaccacgccgacgccgagtttcaggagtgtcttcaagaagatacgtcttttgggggcaacctcgggcgagcagtcttccaggccaaaaagcgggttctcgaacctcttggtctggttgagacgccagctaagacggcacctggaaagaagcgaccggtagactcgccagactccacctcgggcatcggcaagaaaggccagcagcccgcgaaaaagagactcaactttgggcagactggcgactcagagtcagtccccgaccctcaaccaatcggagaaccaccagcaggcccctctggtctgggatctggtacaatggttgcaggcggtggcgcaccaatggctgacaataacgagggcgccgacggagtgggtaatgcctcaggaaattggcattgcgattccacatggctgggcgacagagtcatcaccaccagcacccgaacctgggccctgcccacctacaacaaccacctctacaagcaaatctccagtcagtcagcagggagcaccaacgataacgtctatttcggctacagcaccccctgggggtattttgacttcaacagattccattgccacttctcaccacgtgactggcagcgacttatcaacaacaactggggattccggcccaagaagctcaacttcaagctcttcaacatccaggtcaaggaggtcacgacgaatgacggtgtcacaaccatcgctaataaccttaccagcacggttcaggtcttttcggactcggaatatcaactgccgtacgtcctcggctccgcgcaccagggctgcctgcctccgttcccggcagacgtgttcatgattccgcagtacggatacctgactctgaacaatggcagccaatcggtaggccgttcctccttctactgcctggagtactttccttctcagatgctgagaacgggcaacaacttcacctttagctacaccttcgaggacgtgcctttccacagcagctacgcgcacagccagagtctggaccggctgatgaatcccctcatcgaccagtacctgtactacttggccagaacacagagcaacgcaggaggtactgctggcaatcgggaactgcagttttatcagggcggacctaccaccatggccgaacaagcaaagaactggctgcccggaccttgcttccggcaacagagagtatccaagacgctggatcaaaataacaacagcaactttgcctggactggtgccacaaaataccatttaaatggaagaaattcattggttaatcccggtgtcgccatggcaacccacaaggacgacgaggaacgcttctccccttcgagcggagttctaatttttggcaaaactggagcagctaataaaactacattagaaaacgtgctcatgacaaatgaagaagaaattcgtcctaccaacccggtagctaccgaggaatacgggattgtaagcagcaacttgcaggcggctagcaccgcagcccagacacaagttgttaacaaccagggagccttacctggcatggtctggcagaaccgggacgtgtacctgcaaggtcccatttgggccaagattcctcacacggacggcaactttcacccgtctcctctaatgggtggctttggactgaaacacccgcctccccagatcctgatcaaaaacacgccggtacctgctaatcctccagaagtgtttactcctgccaagtttgcttccttcatcacgcagtacagcaccgggcaagtcagcgttgagatcgagtgggagctgcagaaagagaacagcaagcgctggaacccagagattcagtacacctccaactttgacaaacagactggagtggactttgctgttgacagccagggtgtttactctgagcct

SEQ ID NO: 2406 - protein, 644 aa, Artificial Sequence
  Synthetic polypeptide
KAYDQQLKAGDNPYLRYNHADAEFQECLQEDTSFGGNLGRAVFQAKKRVLEPLGLVETPAKTAPGKKRPVDSPDSTSGIGKKGQQPAKKRLNFGQTGDSESVPDPQPIGEPPAGPSGLGSGTMVAGGGAPMADNNEGADGVGNASGNWHCDSTWLGDRVITTSTRTWALPTYNNHLYKQISSQSAGSTNDNVYFGYSTPWGYFDFNRFHCHFSPRDWQRLINNNWGFRPKKLNFKLFNIQVKEVTTNDGVTTIANNLTSTVQVFSDSEYQLPYVLGSAHQGCLPPFPADVFMIPQYGYLTLNNGSQSVGRSSFYCLEYFPSQMLRTGNNFTFSYTFEDVPFHSSYAHSQSLDRLMNPLIDQYLYYLARTQSNAGGTAGNRELQFYQGGPTTMAEQAKNWLPGPCFRQQRVSKTLDQNNNSNFAWTGATKYHLNGRNSLVNPGVAMATHKDDEERFSPSSGVLIFGKTGAANKTTLENVLMTNEEEIRPTNPVATEEYGIVSSNLQAASTAAQTQVVNNQGALPGMVWQNRDVYLQGPIWAKIPHTDGNFHPSPLMGGFGLKHPPPQILIKNTPVPANPPEVFTPAKFASFITQYSTGQVSVEIEWELQKENSKRWNPEIQYTSNFDKQTGVDFAVDSQGVYSEP

SEQ ID NO: 2407 - DNA, 1933 bp, Artificial Sequence
  Synthetic polynucleotide
caaggcctacgaccagcagctcaaagcgggtgacaatccgtacctgcggtataaccacgccgacgccgagtttcaggagcgtcttcaagaagatacgtcttttgggggcaacctcgggcgagcagtcttccaggccaaaaagcgggttctcgaacctcttggtctggttgagacgccagctaagacggcacctggaaagaagcgaccggtagactcgccagactccacctcgggcatcggcaagaaaggccagcagcccgcgaaaaagagactcaactttgggcagactggcgactcagagccagtccccgaccctcaaccaatcggagaaccaccagcaggcccctctggtctgggatctggtacaatggctgcaggcggtggcgcaccaatggctgacaataacgagggcgccgacggagtgggtaatgcctcaggaaattggcattgcgattccacacggctgggcgacagagtcatcaccaccagcacccgaacctgggccctgcccacctacaacaaccacctctacaagcaaatctccagtcagtcagcagggagcaccaacgataacgtctatttcggctacagcaccccctgggggtattttgacttcaacagattccattgccacttctcaccacgtgactggcagcgacttatcaacaacaactggggattccggcccaagaagctcaacttcaagctcttcaacatccaggtcaaggaggtcacgacgaatgacggcgtcacaaccatcgctaataaccttaccagcacggttcaggtcttttcggactcggaatatcaactgccgtacgtcctcggctccgcgcaccagggctgcctgcctccgttcccggcagacgtgttcatgattccgcagtacggatacctgactctgaacaatggcagccaatcggtaggccgttcctccttctactgcctggagtactttccttctcagatgctgagaacgggcaacaacttcacctttagctacaccttcgaggacgtgcctttccacagcagctacgcgcacagccagagtctgggccggctgatgaatcccctcatcgaccagtacctgtactacttggccagaacacagagcaacgcaggaggtactgctggcaatcgggaactgcagttttatcagggcggacctaccaccatggccgaacaagcaaagaactggctgcccggaccttgcttccggcaacagagagtatccaagacgctggatcaaaataacaacagcaactttgcctggactggtgccacaaaataccatttaaatggaagaaattcattggttaatcccggtgtcgccatggcaacccacaaggacgacgaggaacgcttcttcccttcgagcggagttctaatttttggcaaaactggagcagctaataaaactacattagaaaacgtgctcatgacaaatgaagaagaaattcgtcctaccaacccggtagctaccgaggaatacgggattgtaagcagcaacttgcaggcggctagcaccgcagcccagacacaagttgttaacaaccagggagccttacctggcatggtctggcagaaccgggacgtgtacctgcaaggtcccatttgggccaagattcctcacacggacggcaactttcacccgtctcctctaatgggtggctttggactgaaacacccgcctccccagatcctgatcaaaaacacaccggtacctgctaatcctccagaagtgtttactcctgccaagtttgcttccttcatcacgcagtacagcaccgggcaagtcagcgttgagatcgaatgggagctgcagaaagagaacagcaagcgctggaacccagagattcagtacacctccaactttgacaaacagactggagtggactttgctgttgacagccagggtgtttactctgagcct

SEQ ID NO: 2408 - protein, 644 aa, Artificial Sequence
  Synthetic polypeptide
KAYDQQLKAGDNPYLRYNHADAEFQERLQEDTSFGGNLGRAVFQAKKRVLEPLGLVETPAKTAPGKKRPVDSPDSTSGIGKKGQQPAKKRLNFGQTGDSEPVPDPQPIGEPPAGPSGLGSGTMAAGGGAPMADNNEGADGVGNASGNWHCDSTRLGDRVITTSTRTWALPTYNNHLYKQISSQSAGSTNDNVYFGYSTPWGYFDFNRFHCHFSPRDWQRLINNNWGFRPKKLNFKLFNIQVKEVTTNDGVTTIANNLTSTVQVFSDSEYQLPYVLGSAHQGCLPPFPADVFMIPQYGYLTLNNGSQSVGRSSFYCLEYFPSQMLRTGNNFTFSYTFEDVPFHSSYAHSQSLGRLMNPLIDQYLYYLARTQSNAGGTAGNRELQFYQGGPTTMAEQAKNWLPGPCFRQQRVSKTLDQNNNSNFAWTGATKYHLNGRNSLVNPGVAMATHKDDEERFFPSSGVLIFGKTGAANKTTLENVLMTNEEEIRPTNPVATEEYGIVSSNLQAASTAAQTQVVNNQGALPGMVWQNRDVYLQGPIWAKIPHTDGNFHPSPLMGGFGLKHPPPQILIKNTPVPANPPEVFTPAKFASFITQYSTGQVSVEIEWELQKENSKRWNPEIQYTSNFDKQTGVDFAVDSQGVYSEP

SEQ ID NO: 2409 - DNA, 1933 bp, Artificial Sequence; identical to SEQ ID NO: 2407
  Synthetic polynucleotide

SEQ ID NO: 2410 - protein, 644 aa, Artificial Sequence; identical to SEQ ID NO: 2408
  Synthetic polypeptide

SEQ ID NO: 2411 - DNA, 1933 bp, Artificial Sequence
  Synthetic polynucleotide
caaggcctacgaccagcagctcaaagcgggtgacaatccgtacctgcggtataaccacgccgacgccgagtttcaggagcgtcttcaagaagatacgtcttttgggggcaacctcgggcgagcagtcttccaggccaaaaagcgggttctcgaacctcttggtctggttgagacgccagctaagacggcacctggaaagaagcgaccggtagactcgccagactccacctcgggcatcggcaagaaaggccagcagcccgcgaaaaagagactcaactttgggcagactggcgactcagagtcagtccccgaccctcaaccaatcggagaaccaccagcaggcccctctggtctgggatctggtacaatggctgcaggcggtggcgcaccaatggctgacaatagcgagggcgccgacggagtgggtaatgcctcaggaaattggcattgcgattccacatggctgggcgacagagtcatcaccaccagcacccgaacctgggccctgcccacctacaacaaccacctctacaagcaaatctccagtcagtcagcagggagcaccaacgataacgtctatttcggctacagcaccccctgggggtattttgacttcaacagattccattgccacttctcaccacgtgactggcagcgacttatcaacaacaactggggattccggcccaagaagctcaacttcaagctcttcaacatccaggtcaaggaggtcacgacgaatgacggtgtcacaaccatcgctaataaccttaccagcacggttcaggtcttttcggactcggaatatcaactgccgtacgtcctcggctccgcgcaccagggctgcctgcctccgttcccggcagacgtgttcatgattccgcagtacggatacctgactctgaacaatggcagccaatcggtaggccgttcctccttctactgcctggagtactttccttctcagatgctgagaacgggcaacaacttcacctttagctacaccttcgaggacgtgcctttccacagcagctacgcgcacagccagagtctggaccggctgatgaatcccctcatcgaccagtacctgtactacttggccagaacacagagcaacgcaggaggtactgctggcaatcgggaactgcagttttatcagggcggacctaccaccatggccgaacaagcaaagaactggctgcccggaccttgcttccggcaacagagagtatccaagacgctggatcaaaataacaacagcaactttgcctggactggtgccacaaaataccatttaaatggaagaaattcattggttaatcccggtgtcgccatggcaacccacaaggacgacgaggaacgcttcttcccttcgagcggagttctaatttttggcaaaactggagcagctaataaaactacattagaaaacgtgctcatgacaaatgaagaagaaattcgtcctaccaacccggtagctaccgaggaatacgggattgtaagcagcaacttgcaggcggctagcaccgcagcccagacacaagttgttaacaaccagggagccttacctggcatggtctggcagaaccgggacgtgtacctgcaaggtcccatttgggccaagattcctcacacggacggcaactttcacccgtctcctctaatgggtggctttggactgaaacacccgcctccccagatcctgatcaaaaacacaccggtacctgctaatcctccagaagtgtttactcctgccaagcttgcttccttcatcacgcagtacagcaccgggcaagtcagcgttgagatcgagtgggagctgcagaaagagaacagcaagcgctggaacccagagattcagtacacctccaactttgacaaacagactggagtggactttgctgttgacagccagggtgtttactctgagcct

SEQ ID NO: 2412 - protein, 644 aa, Artificial Sequence
  Synthetic polypeptide
KAYDQQLKAGDNPYLRYNHADAEFQERLQEDTSFGGNLGRAVFQAKKRVLEPLGLVETPAKTAPGKKRPVDSPDSTSGIGKKGQQPAKKRLNFGQTGDSESVPDPQPIGEPPAGPSGLGSGTMAAGGGAPMADNSEGADGVGNASGNWHCDSTWLGDRVITTSTRTWALPTYNNHLYKQISSQSAGSTNDNVYFGYSTPWGYFDFNRFHCHFSPRDWQRLINNNWGFRPKKLNFKLFNIQVKEVTTNDGVTTIANNLTSTVQVFSDSEYQLPYVLGSAHQGCLPPFPADVFMIPQYGYLTLNNGSQSVGRSSFYCLEYFPSQMLRTGNNFTFSYTFEDVPFHSSYAHSQSLDRLMNPLIDQYLYYLARTQSNAGGTAGNRELQFYQGGPTTMAEQAKNWLPGPCFRQQRVSKTLDQNNNSNFAWTGATKYHLNGRNSLVNPGVAMATHKDDEERFFPSSGVLIFGKTGAANKTTLENVLMTNEEEIRPTNPVATEEYGIVSSNLQAASTAAQTQVVNNQGALPGMVWQNRDVYLQGPIWAKIPHTDGNFHPSPLMGGFGLKHPPPQILIKNTPVPANPPEVFTPAKLASFITQYSTGQVSVEIEWELQKENSKRWNPEIQYTSNFDKQTGVDFAVDSQGVYSEP

SEQ ID NO: 2413 - DNA, 1933 bp, Artificial Sequence
  Synthetic polynucleotide
caaggcctacgaccagcagctcaaagcgggtgacaatccgtacctgcggtataaccacgccgacgccgagtttcaggagcgtcttcaagaagatacgtcttttgggggcaacctcgggcgagcagtcttccaggccaaaaagcgggttctcgaacctcttggtctggttgagacgccagctaagacggcacctggaaagaagcgaccggtagactcgccagactccacctcgggcatcggcaagaaaggccagcagcccgcgaaaaagagactcaactttgggcagactggcgactcagagtcagtccccgaccctcaaccaatcggagaaccaccagcaggcccctctggtctgggatctggtacaatggctgcaggcggtggcgcaccaatggctgacaataacgagggcgccgacggagtgggtaatgcctcaggaaattggcattgcgattccacatggctgggcgacagagtcatcaccaccagcacccgaacctgggccctgcccacctacaacaaccacctctacaagcaaatctccagtcagtcagcagggagcaccaacgataacgtctatttcggctacagcaccccctgggggtattttgacttcaacagattccattgccacttctcaccacgtgactggcagcgacttatcaacaacaactggggattccggcccaagaagctcaacttcaagctcttcaacatccaggtcaaggaggtcacgacgaatgacggcgtcacaaccatcgctaataaccttaccagcacggttcaggtcttttcggacccggaatatcaactgccgtacgtcctcggctccgcgcaccagggctgcctgcctccgttcccggcagacgtgttcatgattccgcagtacggatacctgactctgaacaatggcagccaatcggtaggccgttcctccttctactgcctggagtactttccttctcagatgctgagaacgggcaacaacttcacctttagctacaccttcgaggacgtgcctttccacagcagctacgcgcacagccagagtctggaccggctgatgaatcccctcatcgaccagtacctgtactacttggccagaacacagagcaacgcaggaggtactgctggcaatcgggaactgcagttttatcagggcggacctaccaccatggccgaacaagcaaagaactggctgcccggaccttgcttccggcaacagagagtatccaagacgctggatcaaaataacaacagcaactttgcctggactggtgccacaaaataccatttaaatggaagaaattcattggttaatcccggtgtcgccatggcaacccacaaggacgacgaggaacgcttcttcccttcgagcggagttctaatttttggcaaaactggagcagctaataaaactacattagaaaacgtgctcatgacaaatgaagaagaaattcgtcctaccaacccggtagctaccgaggaatacgggattgtaagcagcaacttgcaggcggctagcaccgcagcccagacacaagttgttaacaaccagggagccttacctggcatggtctggcagaaccgggacgtgtacctgcaaggtcccatttgggccaagattcctcacacggacggcaactttcacccgtctcctctaatgggtggctttggactgaaacacccgcctccccagatcctgatcaaaaacacaccggtacctgctaatcctccagaagtgtttactcctgccaagattgcttccttcatcacgcagtacagcaccgggcaagtcagcgttgagatcgagtgggagctgcagaaagagaacagcaagcgctggaacccagagattcagtacacctccaactttgacaaacagactggagtggactttgctgttgacagccagggtgtttactctgagcct

SEQ ID NO: 2414 - protein, 644 aa, Artificial Sequence
  Synthetic polypeptide
KAYDQQLKAGDNPYLRYNHADAEFQERLQEDTSFGGNLGRAVFQAKKRVLEPLGLVETPAKTAPGKKRPVDSPDSTSGIGKKGQQPAKKRLNFGQTGDSESVPDPQPIGEPPAGPSGLGSGTMAAGGGAPMADNNEGADGVGNASGNWHCDSTWLGDRVITTSTRTWALPTYNNHLYKQISSQSAGSTNDNVYFGYSTPWGYFDFNRFHCHFSPRDWQRLINNNWGFRPKKLNFKLFNIQVKEVTTNDGVTTIANNLTSTVQVFSDPEYQLPYVLGSAHQGCLPPFPADVFMIPQYGYLTLNNGSQSVGRSSFYCLEYFPSQMLRTGNNFTFSYTFEDVPFHSSYAHSQSLDRLMNPLIDQYLYYLARTQSNAGGTAGNRELQFYQGGPTTMAEQAKNWLPGPCFRQQRVSKTLDQNNNSNFAWTGATKYHLNGRNSLVNPGVAMATHKDDEERFFPSSGVLIFGKTGAANKTTLENVLMTNEEEIRPTNPVATEEYGIVSSNLQAASTAAQTQVVNNQGALPGMVWQNRDVYLQGPIWAKIPHTDGNFHPSPLMGGFGLKHPPPQILIKNTPVPANPPEVFTPAKIASFITQYSTGQVSVEIEWELQKENSKRWNPEIQYTSNFDKQTGVDFAVDSQGVYSEP

SEQ ID NO: 2415 - protein, 738 aa, Artificial Sequence
  Synthetic polypeptide
MAADGYLPDWLEDNLSEGIREWWALKPGAPKPKANQQKQDDGRGLVLPGYKYLGPFNGLDKGEPVNAADAAALEHDKAYDQQLKAGDNPYLRYNHADAEFQERLQEDTSFGGNLGRAVFQAKKRVLEPLGLVEEGAKTAPGKKRPVEPSPQRSPDSTTGIGKKGQQPAKKRLNFGQTGDSESVPDPQPIGEPPAGPSGLGSGTMAAGGGAPMADNNEGADGVGSSSGNWHCDSTWLGDRVITTSTRTWALPTYNNHLYKQISNGTSGGSTNDNTYFGYSTPWGYFDFNRFHCHFSPRDWQRLINNNWGFRPKRLNFKLFNIQVKEVTQNEGTKTIANNLTSTIQVFTDSEYQLPYVLGSARQGCLPPFPADVFMIPQYGYLTLNNGSQAVGRSSFYCLEYFPSQMLRTGNNFEFSYQFEDVPFHSSYAHSQSLDRLMNPLIDQYLYYLSRTQSTGGTAGTQQLLFSQAGPNNMSAQAKNWLPGPCYRQQRVSTTLSQNNNSNFAWTGATKYHLNGRDSLVNPGVAMATHKDDEERFFPSSGVLMFGKQGAGKGNVDYSSVMLTSEEEIKTTNPVATEQYGVVADNLQQQNAAPIVGAVNSQGALPGMVWQNRDVYLQGPIWAKIPHTDGNFHPSPLMGGFGLKHPPPQILIKNTPVPADPPTTFSQAKLASFITQYSTGQVSVEIEWELQKENSKRWNPEIQYTSNYYKSTNVDFAVNTDGTYSEPRPIGTRYLTRNL

SEQ ID NO: 2416 - DNA, 3121 bp, Artificial Sequence
  Synthetic polynucleotide
gaattcgcccttctacggctgcgtcaactggaccaatgagaactttcccttcaacgactgtgtcgacaagatggtgatctggtgggaggaggggaagatgaccgccaaggtcgtggagtcggccaaagccattctcggaggaagcaaggtgcgcgtggaccagaaatgcaagtcctcggcccagatagacccgactcccgtgatcgtcacctccaacaccaacatgtgcgccgtgattgacgggaactcaacgaccttcgaacaccagcagccgttgcaagaccggatgttcaaatttgaactcacccgccgtctggatcatgactttgggaaggtcaccaagcaggaagtcaaagactttttccggtgggcaaaggatcacgtggttgaggtggagcacgaattctacgtcaaaaagggtggagccaagaaaagacccgcccccagtgacgcagatataagtgagcccaaacgggtgcgcgagtcagttgcgcagccatcgacgtcagacgcggaagcttcgatcaactacgcagacaggtaccaaaacaaatgttctcgtcacgcgggcatgaatctgatgctgtttccctgcagacaatgcgagagaatgaatcagaattcaaatatctgcttcactcacggacagaaagactgtttagagtgctttcccgtgtcagaatctcaacccgtttctgtcgtcaaaaaggcgtatcagaaactgtgctacattcatcatatcatgggaaaggtgccagacgcttgcactgcctgcgatctggtcgatgtggatttggatgactgcatctttgaacaataaatgatttaaatcaggtatggctgccgatggttatcttccagattggctcgaggacaacctctctgagggcattcgcgagtggtgggcgctgaaacctggagccccgaagcccaaagccaaccagcaaaagcaggacggcggccggggtctggtgcttcctggctacaagtacctcggacccttcaacggactcgacaagggggagcccgtcaacgcggcggacgcagcggccctcgagcacgacaaggcctacgaccagcagctcaaagcgggtgacaatccgtacctgcggtataaccacgccgacgccgagtttcaggagcgtctgcaagaagatacgtcttttgggggcaacctcgggcgagcagtcttccaggccaagaagcgggttctcgaacctctcggtctggttgaggaaggcgctaagacggctcctggaaagaagagaccggtagagccatcaccccagcgttctccagactcctctacgggcatcggcaagaaaggccagcagcccgcgaaaaagagactcaactttgggcagactggcgactcagagtcagtgcccgaccctcaaccaatcggagaaccccccgcaggcccctctggtctgggatctggtacaatggctgcaggcggtggcgctccaatggcagacaataacgaaggcgccgacggagtgggtagttcctcaggaaattggcattgcgattccacatggctgggcgactgagtcatcaccaccagcacccgaacctgggccctccccacctacaacaaccacctctacaagcaaatctccaacgggacttcgggaggaagcaccaacgacaacacctacttcggctacagcaccccctgggggtattttgactttaacagattccactgccacttctcaccacgtgactggcagcgactcatcaacaacaactggggattccggcccaagagactcaacttcaagctcttcaacatccaggtcaaggaggtcacgcagaatgaaggcaccaagaccatcgccaataaccttaccagcacgattcaggtctttacggactcggaataccagctcccgtacgtcctcggctctgcgcaccagggctgcctgcctccgttcccggcggacgtcttcatgattcctcagtacgggtacctgactctgaacaatggcagtcaggccgtgggccgttcctccttctactgcctggagtactttccttctcaaatgctgagaacgggcaacaactttgagttcagctaccagtttgaggacgtgccttttcacagcagctacgcgcacagccaaagcctggaccggctgatgaaccccctcatcgaccagtacctgtactacctgtctcggactcagtccacgggaggtaccgcaggaactcagcagttgctattttctcaggccgggcctaataacatgtcggctcaggccaaaaactggctacccgggccctgctaccggcagtaacgcgtctccacgacactgtcgcaaaataacaacagcaactttgtctggaccggtgccaccaagtatcatctgaatggcagagactctctggtagatcccggtgtcgctatggcaacccacaaggacgacgaagagcgattttttccgtccagcggagtcataatgtttgggaaacagggagctggaaaagacaacgtggactatagcagcgtcatgctaaccagtgaggaagaaattaaaaccaccaacccagtggccacagaacagtacggcgtggtggccgataacctgcaacagcaaaacgccgctcctattgtaggggccgtcaacagtcaaggagccttacctggcatggtctggcagaaccgggacgtgtacctgcagggtcctacctgggccaagattcctcacacggacggaaactttcatccctcgccgctgatgggaggctttggactgaaacacccgcctcctcagatcctgattaagaatacacctgttcccgcggatcctccaactaccttcagtcaagctaagctggcgtcgttcatcacgcagtacagcaccggacaggtcagcgtggaaattgaatgggagctgcaggaagaaaacagcaaacgctggaacccagagattcaatacacttccaactactacaaatctacaaatgtggactttgctgttaacacagatggcacttattctgagcctcgccccatcggcacccgttacctcacccgtaatctgtaattgcttgttaatcaataaaccggttgattcgtttcagttgaactttggtctctgcgaagggcgaattc

SEQ ID NO: 2417 - protein, 738 aa, Artificial Sequence
  Synthetic polypeptide
MAADGYLPDWLEDNLSEGIREWWALKPGAPKPKANQQKQDDGRGLVLPGYKYLGPFNGLDKGEPVNAADAAALEHDKAYDQQLKAGDNPYLRYNHADAEFQERLQEDTSFGGNLGRAVFQAKKRVLEPLGLVEEGAKTAPGKKRPVEPSPQRSPDSSTGIGKKGQQPAKKRLNFGQTGDSESVPDPQPIGEPPAGPSGLGSGTMAAGGGAPMADNNEGADGVGSSSGNWHCDSTWLGDGVITTSTRTWALPTYNNHLYKQISNGTSGGSTNDNTYFGYSTPWGYFDFNRFHCHFSPRDWQRLINNNWGFRPKSLNFKLFNIQVKEVTQNEGTKTIANNLTSTIQVFTDSEYQLPYVLGSAHQGCLPPFPADVFMIPQYGYLTLNNGSQAVGRSSFYCLEYFPSQMLRTGNNFEFSYQFEDVPFHSSYAHSQSLDRLMNPLIDQYLYYLSRTQSTGGTAGTQQLLFSQAGPNNMSAQAKNWLPGPCYRQQRVSTTLSQNDNSNFAWTGATKYHLNGRDSLVNPGVAMATHKDDEERFFPSSGVLMFGKQGAGKDNVDYSSVMLTSEEEIKTTNPVATEQYGVVADNLQQQNAAPIVGAVNSQGALPGMVWQNRDVYLQGPIWAKIPHTDGNFHPSPLMGGFGLKHPPPQILIKNTPVPADPPTTFSQAKLASFITQYSTGQVSVEIEWELQKENSKRWNPEIQYTSNYYKSTNVDFAVNTDGTYSEPRPIGTRYLTRNL

SEQ ID NO: 2418 - DNA, 3121 bp, Artificial Sequence
  Synthetic polynucleotide
gaattcgcccttcgcgagaccaaagttcaactgaaacgaatcaaccggtttattgattaacaagcaattacagattacgggtgaggtaacgggtgccgatggggcgaggctcagaataagtgccatctgtgttaacagcaaagtccacatttgtagatttgtagtagttggaagtgtattgaatctctgggttccagcgtttgctgttttctttctgcagctcccattcaatttccacgctgacctgtccggtgctgtactgcgtgatgaacgacgccagcttagcttgactgaaggtagttggaggatccgcgggaacaggtgtattcttaatcaggatctgaggaggcgggtgtttcagtccaaagcctcccatcagcggcgagggatgaaagtttccgtccgtgtgaggaatcttggcccagataggaccctgcaggtacacgtcccggttctgccagaccatgccaggtaaggctccttgactgttgacggcccctacaataggagcggcgttttgctgttgcaggttatcggccaccacgccgtactgttctgtggccactgggttggtggttttaatttcttcctcactggttagcataacgctgctatagtccacgttgtcttttccagctccctgtttcccaaacattaagactccgctggacggaaaaaatcgctcttcgtcgtccttgtgggttgccatagcgacaccgggatttaccagagagtctctgccattcagatgatacttggtggcaccggtccaggcaaagttgctgttgtcattttgcgacagtgtcgtggagacgcgttgctgccggtagcagggcccgggtagccagtttttggcctgagccgacatgttattaggcccggcctgagaaaatagcaactgctgagttcctgcggtacctcccgtggactgagtccgagacaggtagtacaggtactggtcgatgagggggttcatcagccggtccaggctttggctgtgcgcgtagctgctgtgaaaaggcacgtcctcaaactggtagctgaactcaaagttgttgcccgttctcagcatttgagaaggaaagtactccaggcagtagaaggaggaacggcccacggcctgactgccattgttcagagtcaggtacccgtactgaggaatcatgaagacgtccgccgggaacggaggcaggcagccctggtgcgcagagccgaggacgtacgggagctggtattccgagtccgtaaagacctgaatcgtgctggtaaggttattggcgatggtcttggtgccttcattctgcgtgacctccttgacctggatgttgaagagcttgaagttgaggctcttgggccggaatccccagttgttgttgatgagtcgctgccagtcacgtggtgagaagtggcagtggaatctgttaaagtcaaaatacccccagggggtgctgtagccgaagtaggtgttgtcgttggtgcttcctcccgaagtcccgttggagatttgcttgtagaggtggttgttgtaggtggggagggcccaggttcgggtgctggtggtgatgactccgtcgcccagccatgtggaatcgcaatgccaatttcctgaggaactacccactccgtcggcgccttcgttattgtctgccattggagcgccaccgcctgcagccattgtaccagatcccagaccagaggggcctgcggggggttctccgattggttgagggtcgggcactgactctgagtcgccagtctgcccaaagttgagtctctttttcgcgggctgctggcctttcttgccgatgcccgtagaggagtctggagaacgctggggtgatggctctaccggtctcttctttccaggagccgtcttagcgccttcctcaaccagaccgagaggttcgagaacccgcttcttggcctggaagactgctcgcccgaggttgcccccaaaagacgtatcttcttgcagacgctcctgaaactcggcgtcggcgtggttataccgcaggtacggattgtcacccgctttgagctgctggtcgtaggccttgtcgtgctcgagggccgctgcgtccgccgcgttgacgggctcccccttgtcgagtccgttgaagggtccgaggtacttgtagccaggaagcaccagaccccggccgtcgtcctgcttttgctggttggctttgggcttcggggctccaggtttcagcgcccaccactcgcgaatgccctcagagaggttgtcctcgagccaatctggaagataaccatcggcagccatacctgatttaaatcatttattgttcaaagatgcagtcatccaaatccacattgaccagatcgcaggcagtgcaagcgtctggcacctttcccatgatatgatgaatgtagcacagtttctgatacgcctttttgacgacagaaacgggttgagattctgacacgggaaagcactctaaacagtctttctgtccgtgagtgaagcagatatttgaattctgattcattctctcgcattgtctgcagggaaacagcatcagattcatgcccacgtgacgagaacatttgttttggtacctgtctgcgtagttgatcgaagcttccgcgtctgacgtcgatggctgcgcaactgactcgcgcacccgtttgggctcacttatatctgcgtcactgggggcgggtcttttcttggctccaccctttttgacgtagaattcatgctccacctcaaccacgtgatcctttgcccaccggaaaaagtctttgacttcctgcttggtgaccttcccaaagtcatgatccagacggcgggtgagttcaaatttgaacatccggtcttgcaacggctgctggtgttcgaaggtcgttgagttcccgtcaatcacggcgcacatgttggtgttggaggtgacgatcacgggagtcgggtctatctgggccgaggacttgcatttctggtccacgcgcaccttgcttcctccgagaatggctttggccgactccacgaccttggcggtcatcttcccctcctcccaccagatcaccatcttgtcgacacagtcgttgaagggaaagttctcattggtccagttgacgcagccgtagaaagggcgaattc

SEQ ID NO: 2419 - DNA, 2211 bp, Artificial Sequence
  Synthetic polynucleotide
atggctgctgacggttatcttccagattggctcgaggacaacctttctgaaggcattcgtgagtggtgggctctgaaacctggagtccctcaacccaaagcgaaccaacaacaccaggacaaccgtcggggtcttgtgcttccgggttacaaatacctcggacccggtaacggactcgacaaaggagagccggtcaacgaggcggacgcggcagccctcgaacacgacaaagcttacgaccagcagctcaaggccggtgacaacccgtacctcaagtacaaccacgccgacgccgagtttcaggagcgtcttcaagaagatacgtcttttgggggcaaccttggcagagcagtcttccaggccaaaaagaggatccttgagcctcttggtctggttgaggaagcagctaaaacggctcctggaaagaagggggctgtagatcagtctcctcaggaaccggactcatcatctggtgttggcaaatcgggcaaacagcctgccagaaaaagactaaatttcggtcagactggagactcagagtcagtcccagaccctcaacctctcggagaaccaccagcagcccccacaagtttgggatctaatacaatggcttcaggcggtggcgcaccaatggcagacaataacgagggtgccgatggagtgggtaattcctcaggaaattggcattgcgattcccaatggctgggcgacagagtcatcaccaccagcaccagaacctgggccctgcccacttacaacaaccatctctacaagcaaatctccagccaatcaggagcttcaaacgacaaccactactttggctacagcaccccttgggggtattttgactttaacagattccactgccacttctcaccacgtgactggcagcgactcattaacaacaactggggattccggcccaagaaactcagcttcaagctcttcaacatccaagttagaggggtcacgcagaacgatggcacgacgactattgccaataaccttaccagcacggttcaagtgtttacggactcggagtatcagctcccgtacgtgctcgggtcggcgcaccaaggctgtctcccgccgtttccagcggacgtcttcatggtccctcagtatggatacctcaccctgaacaacggaagtcaagcggtgggacgctcatccttttactgcctggagtacttcccttcgcagatgctaaggactggaaataacttccaattcagctataccttcgaggatgtaccttttcacagcagctacgctcacagccagagtttggatcgcttgatgaatcctcttattgatcagtatctgtactacctgaacagaacgcaaggaacaacctctggaacaaccaaccaatcacggctgctttttagccaggctgggcctcagtctatgtctttgcaggccagaaattggctacctgggccctgctaccggcaacagagactttcaaagactgctaacgacaacaacaacagtaactttccttggacagcggccagcaaatatcatctcaatggccgcgactcgctggtgaatccaggaccagctatggccagtcacaaggacgatgaagaaaaatttttccctatgcacggcaatctaatatttggcaaagaagggacaacggcaagtaacgcagaattagataatgtaatgattacggatgaagaagagattcgtaccaccaatcctgtggcaacagagcagtatggaactgtggcaaataacttgcagagctcaaatacagctcccacgactggaactgtcaatcatcagggggccttacctggcatggtgtggcaagatcgtgacgtgtaccttcaaggacctatctgggcaaagattcctcacacggatggacactttcatccttctcctctgatgggaggctttggactgaaacatccgcctcctcaaatcatgatcaaaaatactccggtaccggcaaatcctccgacgactttcagcccggccaagtttgcttcatttatcactcagtactccactggacaggtcagcgtggaaattgagtgggagctacagaaagaaaacagcaaacgttggaatccagagattcagtacacttccaactacaacaagtctgttaatgtggactttactgtagacactaatggtgtttatagtgaacctcgccctattggaacccggtatctcacacgaaacttgtga

SEQ ID NO: 2420 - protein, 736 aa, Adeno-associated virus 3
MAADGYLPDWLEDNLSEGIREWWALKPGVPQPKANQQHQDNRRGLVLPGYKYLGPGNGLDKGEPVNEADAAALEHDKAYDQQLKAGDNPYLKYNHADAEFQERLQEDTSFGGNLGRAVFQAKKRILEPLGLVEEAAKTAPGKKGAVDQSPQEPDSSSGVGKSGKQPARKRLNFGQTGDSESVPDPQPLGEPPAAPTSLGSNTMASGGGAPMADNNEGADGVGNSSGNWHCDSQWLGDRVITTSTRTWALPTYNNHLYKQISSQSGASNDNHYFGYSTPWGYFDFNRFHCHFSPRDWQRLINNNWGFRPKKLSFKLFNIQVRGVTQNDGTTTIANNLTSTVQVFTDSEYQLPYVLGSAHQGCLPPFPADVFMVPQYGYLTLNNGSQAVGRSSFYCLEYFPSQMLRTGNNFQFSYTFEDVPFHSSYAHSQSLDRLMNPLIDQYLYYLNRTQGTTSGTTNQSRLLFSQAGPQSMSLQARNWLPGPCYRQQRLSKTANDNNNSNFPWTAASKYHLNGRDSLVNPGPAMASHKDDEEKFFPMHGNLIFGKEGTTASNAELDNVMITDEEEIRTTNPVATEQYGTVANNLQSSNTAPTTGTVNHQGALPGMVWQDRDVYLQGPIWAKIPHTDGHFHPSPLMGGFGLKHPPPQIMIKNTPVPANPPTTFSPAKFASFITQYSTGQVSVEIEWELQKENSKRWNPEIQYTSNYNKSVNVDFTVDTNGVYSEPRPIGTRYLTRNL

SEQ ID NO: 2421 - DNA, 4726 bp, Adeno-associated virus serotype 3
ttggccactccctctatgcgcactcgctcgctcggtggggcctggcgaccaaaggtcgccagacggacgtgctttgcacgtccggccccaccgagcgagcgagtgcgcatagagggagtggccaactccatcactagaggtatggcagtgacgtaacgcgaagcgcgcgaagcgagaccacgcctaccagctgcgtcagcagtcaggtgacccttttgcgacagtttgcgacaccacgtggccgctgagggtatatattctcgagtgagcgaaccaggagctccattttgaccgcgaaatttgaacgagcagcagccatgccggggttctacgagattgtcctgaaggtcccgagtgacctggacgagcgcctgccgggcatttctaactcgtttgttaactgggtggccgagaaggaatgggacgtgccgccggattctgacatggatccgaatctgattgagcaggcacccctgaccgtggccgaaaagcttcagcgcgagttcctggtggagtggcgccgcgtgagtaaggccccggaggccctcttttttgtccagttcgaaaagggggagacctacttccacctgcacgtgctgattgagaccatcggggtcaaatccatggtggtcggccgctacgtgagccagattaaagagaagctggtgacccgcatctaccgcggggtcgagccgcagcttccgaactggttcgcggtgaccaaaacgcgaaatggcgccgggggcgggaacaaggtggtggacgactgctacatccccaactacctgctccccaagacccagcccgagctccagtgggcgtggactaacatggaccagtatttaagcgcctgtttgaatctcgcggagcgtaaacggctggtggcgcagcatctgacgcacgtgtcgcagacgcaggagcagaacaaagagaatcagaaccccaattctgacgcgccggtcatcaggtcaaaaacctcagccaggtacatggagctggtcgggtggctggtggaccgcgggatcacgtcagaaaagcaatggattcaggaggaccaggcctcgtacatctccttcaacgccgcctccaactcgcggtcccagatcaaggccgcgctggacaatgcctccaagatcatgagcctgacaaagacggctccggactacctggtgggcagcaacccgccggaggacattaccaaaaatcggatctaccaaatcctggagctgaacgggtacgatccgcagtacgcggcctccgtcttcctgggctgggcgcaaaagaagttcgggaagaggaacaccatctggctctttgggccggccacgacgggtaaaaccaacatcgcggaagccatcgcccacgccgtgcccttctacggctgcgtaaactggaccaatgagaactttcccttcaacgattgcgtcgacaagatggtgatctggtgggaggagggcaagatgacggccaaggtcgtggagagcgccaaggccattctgggcggaagcaaggtgcgcgtggaccaaaagtgcaagtcatcggcccagatcgaacccactcccgtgatcgtcacctccaacaccaacatgtgcgccgtgattgacgggaacagcaccaccttcgagcatcagcagccgctgcaggaccggatgtttgaatttgaacttacccgccgtttggaccatgactttgggaaggtcaccaaacaggaagtaaaggactttttccggtgggcttccgatcacgtgactgacgtggctcatgagttctacgtcagaaagggtggagctaagaaacgccccgcctccaatgacgcggatgtaagcgagccaaaacgggagtgcacgtcacttgcgcagccgacaacgtcagacgcggaagcaccggcggactacgcggacaggtaccaaaacaaatgttctcgtcacgtgggcatgaatctgatgctttttccctgtaaaacatgcgagagaatgaatcaaatttccaatgtctgttttacgcatggtcaaagagactgtggggaatgcttccctggaatgtcagaatctcaacccgtttctgtcgtcaaaaagaagacttatcagaaactgtgtccaattcatcatatcctgggaagggcacccgagattgcctgttcggcctgcgatttggccaatgtggacttggatgactgtgtttctgagcaataaatgacttaaaccaggtatggctgctgacggttatcttccagattggctcgaggacaacctttctgaaggcattcgtgagtggtgggctctgaaacctggagtccctcaacccaaagcgaaccaacaacaccaggacaaccgtcggggtcttgtgcttccgggttacaaatacctcggacccggtaacggactcgacaaaggagagccggtcaacgaggcggacgcggcagccctcgaacacgacaaagcttacgaccagcagctcaaggccggtgacaacccgtacctcaagtacaaccacgccgacgccgagtttcaggagcgtcttcaagaagatacgtcttttgggggcaaccttggcagagcagtcttccaggccaaaaagaggatccttgagcctcttggtctggttgaggaagcagctaaaacggctcctggaaagaagggggctgtagatcagtctcctcaggaaccggactcatcatctggtgttggcaaatcgggcaaacagcctgccagaaaaagactaaatttcggtcagactggagactcagagtcagtcccagaccctcaacctctcggagaaccaccagcagcccccacaagtttgggatctaatacaatggcttcaggcggtggcgcaccaatggcagacaataacgagggtgccgatggagtgggtaattcctcaggaaattggcattgcgattcccaatggctgggcgacagagtcatcaccaccagcaccagaacctgggccctgcccacttacaacaaccatctctacaagcaaatctccagccaatcaggagcttcaaacgacaaccactactttggctacagcaccccttgggggtattttgactttaacagattccactgccacttctcaccacgtgactggcagcgactcattaacaacaactggggattccggcccaagaaactcagcttcaagctcttcaacatccaagttagaggggtcacgcagaacgatggcacgacgactattgccaataaccttaccagcacggttcaagtgtttacggactcggagtatcagctcccgtacgtgctcgggtcggcgcaccaaggctgtctcccgccgtttccagcggacgtcttcatggtccctcagtatggatacctcaccctgaacaacggaagtcaagcggtgggacgctcatccttttactgcctggagtacttcccttcgcagatgctaaggactggaaataacttccaattcagctataccttcgaggatgtaccttttcacagcagctacgctcacagccagagtttggatcgcttgatgaatcctcttattgatcagtatctgtactacctgaacagaacgcaaggaacaacctctggaacaaccaaccaatcacggctgctttttagccaggctgggcctcagtctatgtctttgcaggccagaaattggctacctgggccctgctaccggcaacagagactttcaaagactgctaacgacaacaacaacagtaactttccttggacagcggccagcaaatatcatctcaatggccgcgactcgctggtgaatccaggaccagctatggccagtcacaaggacgatgaagaaaaatttttccctatgcacggcaatctaatatttggcaaagaagggacaacggcaagtaacgcagaattagataatgtaatgattacggatgaagaagagattcgtaccaccaatcctgtggcaacagagcagtatggaactgtggcaaataacttgcagagctcaaatacagctcccacgactggaactgtcaatcatcagggggccttacctggcatggtgtggcaagatcgtgacgtgtaccttcaaggacctatctgggcaaagattcctcacacggatggacactttcatccttctcctctgatgggaggctttggactgaaacatccgcctcctcaaatcatgatcaaaaatactccggtaccggcaaatcctccgacgactttcagcccggccaagtttgcttcatttatcactcagtactccactggacaggtcagcgtggaaattgagtgggagctacagaaagaaaacagcaaacgttggaatccagagattcagtacacttccaactacaacaagtctgttaatgtggactttactgtagacactaatggtgtttatagtgaacctcgccctattggaacccggtatctcacacgaaacttgtgaatcctggttaatcaataaaccgtttaattcgtttcagttgaactttggctcttgtgcacttctttatctttatcttgtttccatggctactgcgtagataagcagcggcctgcggcgcttgcgcttcgcggtttacaactgctggttaatatttaactctcgccatacctctagtgatggagttggccactccctctatgcgcactcgctcgctcggtggggcctggcgaccaaaggtcgccagacggacgtgctttgcacgtccggccccaccgagcgagcgagtgcgcatagagggagtggccaa

SEQ ID NO: 2422 - protein, 737 aa, Artificial Sequence
  Synthetic polypeptide
MAADGYLPDWLEDNLSEGIREWWDLKPGAPKPKANQQKQDNGRGLVLPGYKYLGPFNGLDKGEPVNAADAAALEHDKAYDQQLNAGDNPYLRYNHADAEFQERLQEDTSFGGNLGRAVFQAKKRVLEPLGLVEEGAKTAPAKKRPVEPSPQRSPDSSTGIGKKGQQPARKRLNFGQTGDSESVPDPQPLGEPPAAPSSVGSGTVAAGGGAPMADNNEGADGVGNASGNWHCDSTWLGDRVITTSTRTWALPTYNNHLYEQISSETAGSTNDNTYFGYSTPWGYFDFNRFHCHFSPRDWQRLINNNWGFRPKKLRFKLFNIQVKEVTTNDGVTTIANNLTSTIQVFSDSEYQLPYVLGSAHQGCLPPFPADVFMIPQYGYLTLNNGSQSVGRSSFYCLEYFPSQMLRTGNNFEFSYSFEDVPFHSSYAHSQSLDRLMNPLIDQYLYYLARTQSDPGGTAGNRELQFYQGGPSTMAEQAKNWLPGPCFRQQRVSKTLDQNNNSNFAWTGATKYHLNGRNSLVNPGVAMATHKDDEDRFFPSSGVLIFGKTGATNKTTLENVLMTNEEEIRPTNPVATEEYGIVSSNLQAANTAAQTQVVNNQGALPGMVWQNRDVYLQGPIWAKIPHTDGNFHPSPLMGGFGLKHPPPQILIKNTPVPANPPEVFTPAKFASFITQYSTGQVSVEIEWELQKENSKRWDPEIQYTSNFEKQTGVDFAVDSQGVYSEPRPIGTRYLTRNL

SEQ ID NO: 2423 - DNA, 2211 bp, Artificial Sequence
  Synthetic polynucleotide
atggctgctgacggttatcttccagattggctcgaggacaacctttctgaaggcattcgtgagtggtgggctctgaaacctggagtccctcaacccaaagcgaaccaacaacaccaggacaaccgtcggggtcttgtgcttccgggttacaaatacctcggacccggtaacggactcgacaaaggagagccggtcaacgaggcggacgcggcagccctcgaacacgacaaagcttacgaccagcagctcaaggccggtgacaacccgtacctcaagtacaaccacgccgacgccgagtttcaggagcgtcttcaagaagatacgtcttttgggggcaaccttggcagagcagtcttccaggccaaaaagaggatccttgagcctcttggtctggttgaggaagcagctaaaacggctcctggaaagaagggggctgtagatcagtctcctcaggaaccggactcatcatctggtgttggcaaatcgggcaaacagcctgccagaaaaagactaaatttcggtcagactggagactcagagtcagtcccagaccctcaacctctcggagaaccaccagcagcccccacaagtttgggatctaatacaatggcttcaggcggtggcgcaccaatggcagacaataacgagggtgccgatggagtgggtaattcctcaggaaattggcattgcgattcccaatggctgggcgacagagtcatcaccaccagcaccagaacctgggccctgcccacttacaacaaccatctctacaagcaaatctccagccaatcaggagcttcaaacgacaaccactactttggctacagcaccccttgggggtattttgactttaacagattccactgccacttctcaccacgtgactggcagcgactcattaacaacaactggggattccggcccaagaaactcagcttcaagctcttcaacatccaagttagaggggtcacgcagaacgatggcacgacgactattgccaataaccttaccagcacggttcaagtgtttacggactcggagtatcagctcccgtacgtgctcgggtcggcgcaccaaggctgtctcccgccgtttccagcggacgtcttcatggtccctcagtatggatacctcaccctgaacaacggaagtcaagcggtgggacgctcatccttttactgcctggagtacttcccttcgcagatgctaaggactggaaataacttccaattcagctataccttcgaggatgtaccttttcacagcagctacgctcacagccagagtttggatcgcttgatgaatcctcttattgatcagtatctgtactacctgaacagaacgcaaggaacaacctctggaacaaccaaccaatcacggctgctttttagccaggctgggcctcagtctatgtctttgcaggccagaaattggctacctgggccctgctaccggcaacagagactttcaaagactgctaacgacaacaacaacagtaactttccttggacagcggccagcaaatatcatctcaatggccgcgactcgctggtgaatccaggaccagctatggccagtcacaaggacgatgaagaaaaatttttccctatgcacggcaatctaatatttggcaaagaagggacaacggcaagtaacgcagaattagataatgtaatgattacggatgaagaagagattcgtaccaccaatcctgtggcaacagagcagtatggaactgtggcaaataacttgcagagctcaaatacagctcccacgactggaactgtcaatcatcagggggccttacctggcatggtgtggcaagatcgtgacgtgtaccttcaaggacctatctgggcaaagattcctcacacggatggacactttcatccttctcctctgatgggaggctttggactgaaacatccgcctcctcaaatcatgatcaaaaatactccggtaccggcaaatcctccgacgactttcagcccggccaagtttgcttcatttatcactcagtactccactggacaggtcagcgtggaaattgagtgggagctacagaaagaaaacagcaaacgttggaatccagagattcagtacacttccaactacaacaagtctgttaatgtggactttactgtagacactaatggtgtttatagtgaacctcgccctattggaacccggtatctcacacgaaacttgtaa

SEQ ID NO: 2424 - protein, 736 aa, Artificial Sequence; identical to SEQ ID NO: 2420
  Synthetic polypeptide

SEQ ID NO: 2425 - protein, 736 aa, Adeno-associated virus 3A; identical to SEQ ID NO: 2420

SEQ ID NO: 2426 - protein, 624 aa, Adeno-associated virus 3A
MPGFYEIVLKVPSDLDERLPGISNSFVNWVAEKEWDVPPDSDMDPNLIEQAPLTVAEKLQREFLVEWRRVSKAPEALFFVQFEKGETYFHLHVLIETIGVKSMVVGRYVSQIKEKLVTRIYRGVEPQLPNWFAVTKTRNGAGGGNKVVDDCYIPNYLLPKTQPELQWAWTNMDQYLSACLNLAERKRLVAQHLTHVSQTQEQNKENQNPNSDAPVIRSKTSARYMELVGWLVDRGITSEKQWIQEDQASYISFNAASNSRSQIKAALDNASKIMSLTKTAPDYLVGSNPPEDITKNRIYQILELNGYDPQYAASVFLGWAQKKFGKRNTIWLFGPATTGKTNIAEAIAHAVPFYGCVNWTNENFPFNDCVDKMVIWWEEGKMTAKVVESAKAILGGSKVRVDQKCKSSAQIEPTPVIVTSNTNMCAVIDGNSTTFEHQQPLQDRMFEFELTRRLDHDFGKVTKQEVKDFFRWASDHVTDVAHEFYVRKGGAKKRPASNDADVSEPKRECTSLAQPTTSDAEAPADYADRYQNKCSRHVGMNLMLFPCKTCERMNQISNVCFTHGQRDCGECFPGMSESQPVSVVKKKTYQKLCPIHHILGRAPEIACSACDLANVDLDDCVSEQ

SEQ ID NO: 2427 - protein, 736 aa, Adeno-associated virus 3B
MAADGYLPDWLEDNLSEGIREWWALKPGVPQPKANQQHQDNRRGLVLPGYKYLGPGNGLDKGEPVNEADAAALEHDKAYDQQLKAGDNPYLKYNHADAEFQERLQEDTSFGGNLGRAVFQAKKRILEPLGLVEEAAKTAPGKKRPVDQSPQEPDSSSGVGKSGKQPARKRLNFGQTGDSESVPDPQPLGEPPAAPTSLGSNTMASGGGAPMADNNEGADGVGNSSGNWHCDSQWLGDRVITTSTRTWALPTYNNHLYKQISSQSGASNDNHYFGYSTPWGYFDFNRFHCHFSPRDWQRLINNNWGFRPKKLSFKLFNIQVKEVTQNDGTTTIANNLTSTVQVFTDSEYQLPYVLGSAHQGCLPPFPADVFMVPQYGYLTLNNGSQAVGRSSFYCLEYFPSQMLRTGNNFQFSYTFEDVPFHSSYAHSQSLDRLMNPLIDQYLYYLNRTQGTTSGTTNQSRLLFSQAGPQSMSLQARNWLPGPCYRQQRLSKTANDNNNSNFPWTAASKYHLNGRDSLVNPGPAMASHKDDEEKFFPMHGNLIFGKEGTTASNAELDNVMITDEEEIRTTNPVATEQYGTVANNLQSSNTAPTTRTVNDQGALPGMVWQDRDVYLQGPIWAKIPHTDGHFHPSPLMGGFGLKHPPPQIMIKNTPVPANPPTTFSPAKFASFITQYSTGQVSVEIEWELQKENSKRWNPEIQYTSNYNKSVNVDFTVDTNGVYSEPRPIGTRYLTRNL

SEQ ID NO: 2428 - protein, 624 aa, Adeno-associated virus 3B
MPGFYEIVLKVPSDLDEHLPGISNSFVNWVAEKEWELPPDSDMDPNLIEQAPLTVAEKLQREFLVEWRRVSKAPEALFFVQFEKGETYFHLHVLIETIGVKSMVVGRYVSQIKEKLVTRIYRGVEPQLPNWFAVTKTRNGAGGGNKVVDDCYIPNYLLPKTQPELQWAWTNMDQYLSACLNLAERKRLVAQHLTHVSQTQEQNKENQNPNSDAPVIRSKTSARYMELVGWLVDRGITSEKQWIQEDQASYISFNAASNSRSQIKAALDNASKIMSLTKTAPDYLVGSNPPEDITKNRIYQILELNGYDPQYAASVFLGWAQKKFGKRNTIWLFGPATTGKTNIAEAIAHAVPFYGCVNWTNENFPFNDCVDKMVIWWEEGKMTAKVVESAKAILGGSKVRVDQKCKSSAQIEPTPVIVTSNTNMCAVIDGNSTTFEHQQPLQDRMFKFELTRRLDHDFGKVTKQEVKDFFRWASDHVTDVAHEFYVRKGGAKKRPASNDADVSEPKRQCTSLAQPTTSDAEAPADYADRYQNKCSRHVGMNLMLFPCKTCERMNQISNVCFTHGQRDCGECFPGMSESQPVSVVKKKTYQKLCPIHHILGRAPEIACSACDLANVDLDDCVSEQ

SEQ ID NO: 2429 - DNA, 4722 bp, Adeno-associated virus 3B
tggccactccctctatgcgcactcgctcgctcggtggggcctggcgaccaaaggtcgccagacggacgtgctttgcacgtccggccccaccgagcgagcgagtgcgcatagagggagtggccaactccatcactagaggtatggcagtgacgtaacgcgaagcgcgcgaagcgagaccacgcctaccagctgcgtcagcagtcaggtgacccttttgcgacagtttgcgacaccacgtggccgctgagggtatatattctcgagtgagcgaaccaggagctccattttgaccgcgaaatttgaacgagcagcagccatgccggggttctacgagattgtcctgaaggtcccgagtgacctggacgagcacctgccgggcatttctaactcgtttgttaactgggtggccgagaaggaatgggagctgccgccggattctgacatggatccgaatctgattgagcaggcacccctgaccgtggccgaaaagcttcagcgcgagttcctggtggagtggcgccgcgtgagtaaggccccggaggccctcttttttgtccagttcgaaaagggggagacctacttccacctgcacgtgctgattgagaccatcggggtcaaatccatggtggtcggccgctacgtgagccagattaaagagaagctggtgacccgcatctaccgcggggtcgagccgcagcttccgaactggttcgcggtgaccaaaacgcgaaatggcgccgggggcgggaacaaggtggtggacgactgctacatccccaactacctgctccccaagacccagcccgagctccagtgggcgtggactaacatggaccagtatttaagcgcctgtttgaatctcgcggagcgtaaacggctggtggcgcagcatctgacgcacgtgtcgcagacgcaggagcagaacaaagagaatcagaaccccaattctgacgcgccggtcatcaggtcaaaaacctcagccaggtacatggagctggtcgggtggctggtggaccgcgggatcacgtcagaaaagcaatggattcaggaggaccaggcctcgtacatctccttcaacgccgcctccaactcgcggtcccagatcaaggccgcgctggacaatgcctccaagatcatgagcctgacaaagacggctccggactacctggtgggcagcaacccgccggaggacattaccaaaaatcggatctaccaaatcctggagctgaacgggtacgatccgcagtacgcggcctccgtcttcctgggctgggcgcaaaagaagttcgggaagaggaacaccatctggctctttgggccggccacgacgggtaaaaccaacatcgcggaagccatcgcccacgccgtgcccttctacggctgcgtaaactggaccaatgagaactttcccttcaacgattgcgtcgacaagatggtgatctggtgggaggagggcaagatgacggccaaggtcgtggagagcgccaaggccattctgggcggaagcaaggtgcgcgtggaccaaaagtgcaagtcatcggcccagatcgaacccactcccgtgatcgtcacctccaacaccaacatgtgcgccgtgattgacgggaacagcaccaccttcgagcatcagcagccgctgcaggaccggatgtttaaatttgaacttacccgccgtttggaccatgactttgggaaggtcaccaaacaggaagtaaaggactttttccggtgggcttccgatcacgtgactgacgtggctcatgagttctacgtcagaaagggtggagctaagaaacgccccgcctccaatgacgcggatgtaagcgagccaaaacggcagtgcacgtcacttgcgcagccgacaacgtcagacgcggaagcaccggcggactacgcggacaggtaccaaaacaaatgttctcgtcacgtgggcatgaatctgatgctttttccctgtaaaacatgcgagagaatgaatcaaatttccaatgtctgttttacgcatggtcaaagagactgtggggaatgcttccctggaatgtcagaatctcaacccgtttctgtcgtcaaaaagaagacttatcagaaactgtgtccaattcatcatatcctgggaagggcacccgagattgcctgttcggcctgcgatttggccaatgtggacttggatgactgtgtttctgagcaataaatgacttaaaccaggtatggctgctgacggttatcttccagattggctcgaggacaacctttctgaaggcattcgtgagtggtgggctctgaaacctggagtccctcaacccaaagcgaaccaacaacaccaggacaaccgtcggggtcttgtgcttccgggttacaaatacctcggacccggtaacggactcgacaaaggagagccggtcaacgaggcggacgcggcagccctcgaacacgacaaagcttacgaccagcagctcaaggccggtgacaacccgtacctcaagtacaaccacgccgacgccgagtttcaggagcgtcttcaagaagatacgtcttttgggggcaaccttggcagagcagtcttccaggccaaaaagaggatccttgagcctcttggtctggttgaggaagcagctaaaacggctcctggaaagaagaggcctgtagatcagtctcctcaggaaccggactcatcatctggtgttggcaaatcgggcaaacagcctgccagaaaaagactaaatttcggtcagactggcgactcagagtcagtcccagaccctcaacctctcggagaaccaccagcagcccccacaagtttgggatctaatacaatggcttcaggcggtggcgcaccaatggcagacaataacgagggtgccgatggagtgggtaattcctcaggaaattggcattgcgattcccaatggctgggcgacagagtcatcaccaccagcaccagaacctgggccctgcccacttacaacaaccatctctacaagcaaatctccagccaatcaggagcttcaaacgacaaccactactttggctacagcaccccttgggggtattttgactttaacagattccactgccacttctcaccacgtgactggcagcgactcattaacaacaactggggattccggcccaagaaactcagcttcaagctcttcaacatccaagttaaagaggtcacgcagaacgatggcacgacgactattgccaataaccttaccagcacggttcaagtgtttacggactcggagtatcagctcccgtacgtgctcgggtcggcgcaccaaggctgtctcccgccgtttccagcggacgtcttcatggtccctcagtatggatacctcaccctgaacaacggaagtcaagcggtgggacgctcatccttttactgcctggagtacttcccttcgcagatgctaaggactggaaataacttccaattcagctataccttcgaggatgtaccttttcacagcagctacgctcacagccagagtttggatcgcttgatgaatcctcttattgatcagtatctgtactacctgaacagaacgcaaggaacaacctctggaacaaccaaccaatcacggctgctttttagccaggctgggcctcagtctatgtctttgcaggccagaaattggctacctgggccctgctaccggcaacagagactttcaaagactgctaacgacaacaacaacagtaactttccttggacagcggccagcaaatatcatctcaatggccgcgactcgctggtgaatccaggaccagctatggccagtcacaaggacgatgaagaaaaatttttccctatgcacggcaatctaatatttggcaaagaagggacaacggcaagtaacgcagaattagataatgtaatgattacggatgaagaagagattcgtaccaccaatcctgtggcaacagagcagtatggaactgtggcaaataacttgcagagctcaaatacagctcccacgactagaactgtcaatgatcagggggccttacctggcatggtgtggcaagatcgtgacgtgtaccttcaaggacctatctgggcaaagattcctcacacggatggacactttcatccttctcctctgatgggaggctttggactgaaacatccgcctcctcaaatcatgatcaaaaatactccggtaccggcaaatcctccgacgactttcagcccggccaagtttgcttcatttatcactcagtactccactggacaggtcagcgtggaaattgagtgggagctacagaaagaaaacagcaaacgttggaatccagagattcagtacacttccaactacaacaagtctgttaatgtggactttactgtagacactaatggtgtttatagtgaacctcgccctattggaacccggtatctcacacgaaacttgtaatcctggttaatcaataaaccgtttaattcgtttcagttgaactttggctcttgtgcacttcttatcttatcttgtttccatggctactgcgtagataagcagcggcctgcggcgcttgcgcttcgcggtttacaactgctggttaatatttaactctcgccatacctctagtgatggagttggccactccctctatgcgcactcgctcgctcggtggggccggacgtgcaaagcacgtccgtctggcgacctttggtcgccaggccccaccgagcgagcgagtgcgcatagagggagtggccaa

SEQ ID NO: 2430 - DNA, 1800 bp, Adeno-associated virus 4
  modified_base (342)..(342): a, c, g, or t
  misc_feature (342)..(342): n is a, c, g, or t
acggctcctggaaagaagagaccgttgattgaatccccccagcagcccgactcctccacgggtatcggcaaaaaaggcaagcagccggctaaaaagaagctcgttttcgaagacgaaactggagcaggcgacggaccccctgagggatcaacttccggagccatgtctgatgacagtgagatgcgtgcagcagctggcggagctgcagtcgagggsggacaaggtgccgatggagtgggtaatgcctcgggtgattggcattgcgattccacctggtctgagggccacgtcacgaccaccagcaccagaacctgggtcttgcccacctacaacaaccacctntacaagcgactcggagagagcctgcagtccaacacctacaacggattctccaccccctggggatactttgacttcaaccgcttccactgccacttctcaccacgtgactggcagcgactcatcaacaacaactggggcatgcgacccaaagccatgcgggtcaaaatcttcaacatccaggtcaaggaggtcacgacgtcgaacggcgagacaacggtggctaataaccttaccagcacggttcagatctttgcggactcgtcgtacgaactgccgtacgtgatggatgcgggtcaagagggcagcctgcctccttttcccaacgacgtctttatggtgccccagtacggctactgtggactggtgaccggcaacacttcgcagcaacagactgacagaaatgccttctactgcctggagtactttccttcgcagatgctgcggactggcaacaactttgaaattacgtacagttttgagaaggtgcctttccactcgatgtacgcgcacagccagagcctggaccggctgatgaaccctctcatcgaccagtacctgtggggactgcaatcgaccaccaccggaaccaccctgaatgccgggactgccaccaccaactttaccaagctgcggcctaccaacttttccaactttaaaaagaactggctgcccgggccttcaatcaagcagcagggcttctcaaagactgccaatcaaaactacaagatccctgccaccgggtcagacagtctcatcaaatacgagacgcacagcactctggacggaagatggagtgccctgacccccggacctccaatggccacggctggacctgcggacagcaagttcagcaacagccagctcatctttgcggggcctaaacagaacggcaacacggccaccgtacccgggactctgatcttcacctctgaggaggagctggcagccaccaacgccaccgatacggacatgtggggcaacctacctggcggtgaccagagcaacagcaacctgccgaccgtggacagactgacagccttgggagccgtgcctggaatggtctggcaaaacagagacatttactaccagggtcccatttgggccaagattcctcataccgatggacactttcacccctcaccgctgattggtgggtttgggctgaaacacccgcctcctcaaatttttatcaagaacaccccggtacctgcgaatcctgcaacgaccttcagctctactccggtaaactccttcattactcagtacagcactggccaggtgtcggtgcagattgactgggagatccagaaggagcggtccaaacgctggaaccccgaggtccagtttacctccaactacggacagcaaaactctctgttgtgggctcccgatgcggctgggaaatacactgagcctagggctatcggtacccgctacctcacccaccacctgtaataa

SEQ ID NO: 2431 - DNA, 2208 bp, Adeno-associated virus 4
  modified_base (750)..(750): a, c, g, or t
  misc_feature (750)..(750): n is a, c, g, or t
atgactgacggttaccttccagattggctagaggacaacctctctgaaggcgttcgagagtggtgggcgctgcaacctggagcccctaaacccaaggcaaatcaacaacatcaggacaacgctcggggtcttgtgcttccgggttacaaatacctcggacccggcaacggactcgacaagggggaacccgtcaacgcagcggacgcggcagccctcgagcacgacaaggcctacgaccagcagctcaaggccggtgacaacccctacctcaagtacaaccacgccgacgcggagttccagcagcggcttcagggcgacacatcgtttgggggcaacctcggcagagcagtcttccaggccaaaaagagggttcttgaacctcttggtctggttgagcaagcgggtgagacggctcctggaaagaagagaccgttgattgaatccccccagcagcccgactcctccacgggtatcggcaaaaaaggcaagcagccggctaaaaagaagctcgttttcgaagacgaaactggagcaggcgacggaccccctgagggatcaacttccggagccatgtctgatgacagtgagatgcgtgcagcagctggcggagctgcagtcgagggsggacaaggtgccgatggagtgggtaatgcctcgggtgattggcattgcgattccacctggtctgagggccacgtcacgaccaccagcaccagaacctgggtcttgcccacctacaacaaccacctntacaagcgactcggagagagcctgcagtccaacacctacaacggattctccaccccctggggatactttgacttcaaccgcttccactgccacttctcaccacgtgactggcagcgactcatcaacaacaactggggcatgcgacccaaagccatgcgggtcaaaatcttcaacatccaggtcaaggaggtcacgacgtcgaacggcgagacaacggtggctaataaccttaccagcacggttcagatctttgcggactcgtcgtacgaactgccgtacgtgatggatgcgggtcaagagggcagcctgcctccttttcccaacgacgtctttatggtgccccagtacggctactgtggactggtgaccggcaacacttcgcagcaacagactgacagaaatgccttctactgcctggagtactttccttcgcagatgctgcggactggcaacaactttgaaattacgtacagttttgagaaggtgcctttccactcgatgtacgcgcacagccagagcctggaccggctgatgaaccctctcatcgaccagtacctgtggggactgcaatcgaccaccaccggaaccaccctgaatgccgggactgccaccaccaactttaccaagctgcggcctaccaacttttccaactttaaaaagaactggctgcccgggccttcaatcaagcagcagggcttctcaaagactgccaatcaaaactacaagatccctgccaccgggtcagacagtctcatcaaatacgagacgcacagcactctggacggaagatggagtgccctgacccccggacctccaatggccacggctggacctgcggacagcaagttcagcaacagccagctcatctttgcggggcctaaacagaacggcaacacggccaccgtacccgggactctgatcttcacctctgaggaggagctggcagccaccaacgccaccgatacggacatgtggggcaacctacctggcggtgaccagagcaacagcaacctgccgaccgtggacagactgacagccttgggagccgtgcctggaatggtctggcaaaacagagacatttactaccagggtcccatttgggccaagattcctcataccgatggacactttcacccctcaccgctgattggtgggtttgggctgaaacacccgcctcctcaaatttttatcaagaacaccccggtacctgcgaatcctgcaacgaccttcagctctactccggtaaactccttcattactcagtacagcactggccaggtgtcggtgcagattgactgggagatccagaaggagcggtccaaacgctggaaccccgaggtccagtttacctccaactacggacagcaaaactctctgttgtgggctcccgatgcggctgggaaatacactgagcctagggctatcggtacccgctacctcacccaccacctgtaataa

SEQ ID NO: 2432 - DNA, 1872 bp, Adeno-associated virus 4
atgccggggttctacgagatcgtgctgaaggtgcccagcgacctggacgagcacctgcccggcatttctgactcttttgtgagctgggtggccgagaaggaatgggagctgccgccggattctgacatggacttgaatctgattgagcaggcacccctgaccgtggccgaaaagctgcaacgcgagttcctggtcgagtggcgccgcgtgagtaaggccccggaggccctcttctttgtccagttcgagaagggggacagctacttccacctgcacatcctggtggagaccgtgggcgtcaaatccatggtggtgggccgctacgtgagccagattaaagagaagctggtgacccgcatctaccgcggggtcgagccgcagcttccgaactggttcgcggtgaccaagacgcgtaatggcgccggaggcgggaacaaggtggtggacgactgctacatccccaactacctgctccccaagacccagcccgagctccagtgggcgtggactaacatggaccagtatataagcgcctgtttgaatctcgcggagcgtaaacggctggtggcgcagcatctgacgcacgtgtcgcagacgcaggagcagaacaaggaaaaccagaaccccaattctgacgcgccggtcatcaggtcaaaaacctccgccaggtacatggagctggtcgggtggctggtggaccgcgggatcacgtcagaaaagcaatggatccaggaggaccaggcgtcctacatctccttcaacgccgcctccaactcgcggtcacaaatcaaggccgcgctggacaatgcctccaaaatcatgagcctgacaaagacggctccggactacctggtgggccagaacccgccggaggacatttccagcaaccgcatctaccgaatcctcgagatgaacgggtacgatccgcagtacgcggcctccgtcttcctgggctgggcgcaaaagaagttcgggaagaggaacaccatctggctctttgggccggccacgacgggtaaaaccaacatcgcggaagccatcgcccacgccgtgcccttctacggctgcgtgaactggaccaatgagaactttccgttcaacgattgcgtcgacaagatggtgatctggtgggaggagggcaagatgacggccaaggtcgtagagagcgccaaggccatcctgggcggaagcaaggtgcgcgtggaccaaaagtgcaagtcatcggcccagatcgacccaactcccgtgatcgtcacctccaacaccaacatgtgcgcggtcatcgacggaaactcgaccaccttcgagcaccaacaaccactccaggaccggatgttcaagttcgagctcaccaagcgcctggagcacgactttggcaaggtcaccaagcaggaagtcaaagactttttccggtgggcgtcagatcacgtgaccgaggtgactcacgagttttacgtcagaaagggtggagctagaaagaggcccgcccccaatgacgcagatataagtgagcccaagcgggcctgtccgtcagttgcgcagccatcgacgtcagacgcggaagctccggtggactacgcggacaggtaccaaaacaaatgttctcgtcacgtgggtatgaatctgatgctttttccctgccggcaatgcgagagaatgaatcagaatgtggacatttgcttcacgcacggggtcatggactgtgccgagtgcttccccgtgtcagaatctcaacccgtgtctgtcgtcagaaagcggacgtatcagaaactgtgtccgattcatcacatcatggggagggcgcccgaggtggcctgctcggcctgcgaactggccaatgtggacttggatgactgtgacatggaacaataa

SEQ ID NO: 2433 - DNA, 1611 bp, Adeno-associated virus 4
atgccggggttctacgagatcgtgctgaaggtgcccagcgacctggacgagcacctgcccggcatttctgactcttttgtgagctgggtggccgagaaggaatgggagctgccgccggattctgacatggacttgaatctgattgagcaggcacccctgaccgtggccgaaaagctgcaacgcgagttcctggtcgagtggcgccgcgtgagtaaggccccggaggccctcttctttgtccagttcgagaagggggacagctacttccacctgcacatcctggtggagaccgtgggcgtcaaatccatggtggtgggccgctacgtgagccagattaaagagaagctggtgacccgcatctaccgcggggtcgagccgcagcttccgaactggttcgcggtgaccaagacgcgtaatggcgccggaggcgggaacaaggtggtggacgactgctacatccccaactacctgctccccaagacccagcccgagctccagtgggcgtggactaacatggaccagtatataagcgcctgtttgaatctcgcggagcgtaaacggctggtggcgcagcatctgacgcacgtgtcgcagacgcaggagcagaacaaggaaaaccagaaccccaattctgacgcgccggtcatcaggtcaaaaacctccgccaggtacatggagctggtcgggtggctggtggaccgcgggatcacgtcagaaaagcaatggatccaggaggaccaggcgtcctacatctccttcaacgccgcctccaactcgcggtcacaaatcaaggccgcgctggacaatgcctccaaaatcatgagcctgacaaagacggctccggactacctggtgggccagaacccgccggaggacatttccagcaaccgcatctaccgaatcctcgagatgaacgggtacgatccgcagtacgcggcctccgtcttcctgggctgggcgcaaaagaagttcgggaagaggaacaccatctggctctttgggccggccacgacgggtaaaaccaacatcgcggaagccatcgcccacgccgtgcccttctacggctgcgtgaactggaccaatgagaactttccgttcaacgattgcgtcgacaagatggtgatctggtgggaggagggcaagatgacggccaaggtcgtagagagcgccaaggccatcctgggcggaagcaaggtgcgcgtggaccaaaagtgcaagtcatcggcccagatcgacccaactcccgtgatcgtcacctccaacaccaacatgtgcgcggtcatcgacggaaactcgaccaccttcgagcaccaacaaccactccaggaccggatgttcaagttcgagctcaccaagcgcctggagcacgactttggcaaggtcaccaagcaggaagtcaaagactttttccggtgggcgtcagatcacgtgaccgaggtgactcacgagttttacgtcagaaagggtggagctagaaagaggcccgcccccaatgacgcagatataagtgagcccaagcgggcctgtccgtcagttgcgcagccatcgacgtcagacgcggaagctccggtggactacgcggacagattggctagaggacaacctctctga

SEQ ID NO: 2434 - DNA, 1872 bp, Adeno-associated virus 4; identical to SEQ ID NO: 2432

SEQ ID NO: 2435 - DNA, 1617 bp, Adeno-associated virus 4
  modified_base (162)..(162): a, c, g, or t
  misc_feature (162)..(162): n is a, c, g, or t
atgcgtgcagcagctggcggagctgcagtcgagggsggacaaggtgccgatggagtgggtaatgcctcgggtgattggcattgcgattccacctggtctgagggccacgtcacgaccaccagcaccagaacctgggtcttgcccacctacaacaaccacctntacaagcgactcggagagagcctgcagtccaacacctacaacggattctccaccccctggggatactttgacttcaaccgcttccactgccacttctcaccacgtgactggcagcgactcatcaacaacaactggggcatgcgacccaaagccatgcgggtcaaaatcttcaacatccaggtcaaggaggtcacgacgtcgaacggcgagacaacggtggctaataaccttaccagcacggttcagatctttgcggactcgtcgtacgaactgccgtacgtgatggatgcgggtcaagagggcagcctgcctccttttcccaacgacgtctttatggtgccccagtacggctactgtggactggtgaccggcaacacttcgcagcaacagactgacagaaatgccttctactgcctggagtactttccttcgcagatgctgcggactggcaacaactttgaaattacgtacagttttgagaaggtgcctttccactcgatgtacgcgcacagccagagcctggaccggctgatgaaccctctcatcgaccagtacctgtggggactgcaatcgaccaccaccggaaccaccctgaatgccgggactgccaccaccaactttaccaagctgcggcctaccaacttttccaactttaaaaagaactggctgcccgggccttcaatcaagcagcagggcttctcaaagactgccaatcaaaactacaagatccctgccaccgggtcagacagtctcatcaaatacgagacgcacagcactctggacggaagatggagtgccctgacccccggacctccaatggccacggctggacctgcggacagcaagttcagcaacagccagctcatctttgcggggcctaaacagaacggcaacacggccaccgtacccgggactctgatcttcacctctgaggaggagctggcagccaccaacgccaccgatacggacatgtggggcaacctacctggcggtgaccagagcaacagcaacctgccgaccgtggacagactgacagccttgggagccgtgcctggaatggtctggcaaaacagagacatttactaccagggtcccatttgggccaagattcctcataccgatggacactttcacccctcaccgctgattggtgggtttgggctgaaacacccgcctcctcaaatttttatcaagaacaccccggtacctgcgaatcctgcaacgaccttcagctctactccggtaaactccttcattactcagtacagcactggccaggtgtcggtgcagattgactgggagatccagaaggagcggtccaaacgctggaaccccgaggtccagtttacctccaactacggacagcaaaactctctgttgtgggctcccgatgcggctgggaaatacactgagcctagggctatcggtacccgctacctcacccaccacctgtaa

SEQ ID NO: 2436 - DNA, 939 bp, Adeno-associated virus 4
atggagctggtcgggtggctggtggaccgcgggatcacgtcagaaaagcaatggatccaggaggaccaggcgtcctacatctccttcaacgccgcctccaactcgcggtcacaaatcaaggccgcgctggacaatgcctccaaaatcatgagcctgacaaagacggctccggactacctggtgggccagaacccgccggaggacatttccagcaaccgcatctaccgaatcctcgagatgaacgggtacgatccgcagtacgcggcctccgtcttcctgggctgggcgcaaaagaagttcgggaagaggaacaccatctggctctttgggccggccacgacgggtaaaaccaacatcgcggaagccatcgcccacgccgtgcccttctacggctgcgtgaactggaccaatgagaactttccgttcaacgattgcgtcgacaagatggtgatctggtgggaggagggcaagatgacggccaaggtcgtagagagcgccaaggccatcctgggcggaagcaaggtgcgcgtggaccaaaagtgcaagtcatcggcccagatcgacccaactcccgtgatcgtcacctccaacaccaacatgtgcgcggtcatcgacggaaactcgaccaccttcgagcaccaacaaccactccaggaccggatgttcaagttcgagctcaccaagcgcctggagcacgactttggcaaggtcaccaagcaggaagtcaaagactttttccggtgggcgtcagatcacgtgaccgaggtgactcacgagttttacgtcagaaagggtggagctagaaagaggcccgcccccaatgacgcagatataagtgagcccaagcgggcctgtccgtcagttgcgcagccatcgacgtcagacgcggaagctccggtggactacgcggacagattggctagaggacaacctctctga

SEQ ID NO: 2437 - DNA, 1197 bp, Adeno-associated virus 4
atggagctggtcgggtggctggtggaccgcgggatcacgtcagaaaagcaatggatccaggaggaccaggcgtcctacatctccttcaacgccgcctccaactcgcggtcacaaatcaaggccgcgctggacaatgcctccaaaatcatgagcctgacaaagacggctccggactacctggtgggccagaacccgccggaggacatttccagcaaccgcatctaccgaatcctcgagatgaacgggtacgatccgcagtacgcggcctccgtcttcctgggctgggcgcaaaagaagttcgggaagaggaacaccatctggctctttgggccggccacgacgggtaaaaccaacatcgcggaagccatcgcccacgccgtgcccttctacggctgcgtgaactggaccaatgagaactttccgttcaacgattgcgtcgacaagatggtgatctggtgggaggagggcaagatgacggccaaggtcgtagagagcgccaaggccatcctgggcggaagcaaggtgcgcgtggaccaaaagtgcaagtcatcggcccagatcgacccaactcccgtgatcgtcacctccaacaccaacatgtgcgcggtcatcgacggaaactcgaccaccttcgagcaccaacaaccactccaggaccggatgttcaagttcgagctcaccaagcgcctggagcacgactttggcaaggtcaccaagcaggaagtcaaagactttttccggtgggcgtcagatcacgtgaccgaggtgactcacgagttttacgtcagaaagggtggagctagaaagaggcccgcccccaatgacgcagatataagtgagcccaagcgggcctgtccgtcagttgcgcagccatcgacgtcagacgcggaagctccggtggactacgcggacaggtaccaaaacaaatgttctcgtcacgtgggtatgaatctgatgctttttccctgccggcaatgcgagagaatgaatcagaatgtggacatttgcttcacgcacggggtcatggactgtgccgagtgcttccccgtgtcagaatctcaacccgtgtctgtcgtcagaaagcggacgtatcagaaactgtgtccgattcatcacatcatggggagggcgcccgaggtggcctgctcggcctgcgaactggccaatgtggacttggatgactgtgacatggaacaa

SEQ ID NO: 2438 - DNA, 245 bp, Adeno-associated virus 4
ctccatcatctaggtttgcccactgacgtcaatgtgacgtcctagggttagggaggtccctgtattagcagtcacgtgagtgtcgtatttcgcggagcgtagcggagcgcataccaagctgccacgtcacagccacgtggtccgtttgcgacagtttgcgacaccatgtggtcaggagggtatataaccgcgagtgagccagcgaggagctccattttgcccgcgaattttgaacgagcagcagc

SEQ ID NO: 2439 - protein, 313 aa, Adeno-associated virus 4
  MOD_RES (313)..(313): Any naturally occurring amino acid
MELVGWLVDRGITSEKQWIQEDQASYISFNAASNSRSQIKAALDNASKIMSLTKTAPDYLVGQNPPEDISSNRIYRILEMNGYDPQYAASVFLGWAQKKFGKRNTIWLFGPATTGKTNIAEAIAHAVPFYGCVNWTNENFPFNDCVDKMVIWWEEGKMTAKVVESAKAILGGSKVRVDQKCKSSAQIDPTPVIVTSNTNMCAVIDGNSTTFEHQQPLQDRMFKFELTKRLEHDFGKVTKQEVKDFFRWASDHVTEVTHEFYVRKGGARKRPAPNDADISEPKRACPSVAQPSTSDAEAPVDYADRLARGQPLX

SEQ ID NO: 2440 - protein, 399 aa, Adeno-associated virus 4
MELVGWLVDRGITSEKQWIQEDQASYISFNAASNSRSQIKAALDNASKIMSLTKTAPDYLVGQNPPEDISSNRIYRILEMNGYDPQYAASVFLGWAQKKFGKRNTIWLFGPATTGKTNIAEAIAHAVPFYGCVNWTNENFPFNDCVDKMVIWWEEGKMTAKVVESAKAILGGSKVRVDQKCKSSAQIDPTPVIVTSNTNMCAVIDGNSTTFEHQQPLQDRMFKFELTKRLEHDFGKVTKQEVKDFFRWASDHVTEVTHEFYVRKGGARKRPAPNDADISEPKRACPSVAQPSTSDAEAPVDYADRYQNKCSRHVGMNLMLFPCRQCERMNQNVDICFTHGVMDCAECFPVSESQPVSVVRKRTYQKLCPIHHIMGRAPEVACSACELANVDLDDCDMEQ

SEQ ID NO: 2441 - protein, 623 aa, Adeno-associated virus 4
MPGFYEIVLKVPSDLDEHLPGISDSFVSWVAEKEWELPPDSDMDLNLIEQAPLTVAEKLQREFLVEWRRVSKAPEALFFVQFEKGDSYFHLHILVETVGVKSMVVGRYVSQIKEKLVTRIYRGVEPQLPNWFAVTKTRNGAGGGNKVVDDCYIPNYLLPKTQPELQWAWTNMDQYISACLNLAERKRLVAQHLTHVSQTQEQNKENQNPNSDAPVIRSKTSARYMELVGWLVDRGITSEKQWIQEDQASYISFNAASNSRSQIKAALDNASKIMSLTKTAPDYLVGQNPPEDISSNRIYRILEMNGYDPQYAASVFLGWAQKKFGKRNTIWLFGPATTGKTNIAEAIAHAVPFYGCVNWTNENFPFNDCVDKMVIWWEEGKMTAKVVESAKAILGGSKVRVDQKCKSSAQIDPTPVIVTSNTNMCAVIDGNSTTFEHQQPLQDRMFKFELTKRLEHDFGKVTKQEVKDFFRWASDHVTEVTHEFYVRKGGARKRPAPNDADISEPKRACPSVAQPSTSDAEAPVDYADRYQNKCSRHVGMNLMLFPCRQCERMNQNVDICFTHGVMDCAECFPVSESQPVSVVRKRTYQKLCPIHHIMGRAPEVACSACELANVDLDDCDMEQ

SEQ ID NO: 2442 - protein, 537 aa, Adeno-associated virus 4
  MOD_RES (537)..(537): Any naturally occurring amino acid
MPGFYEIVLKVPSDLDEHLPGISDSFVSWVAEKEWELPPDSDMDLNLIEQAPLTVAEKLQREFLVEWRRVSKAPEALFFVQFEKGDSYFHLHILVETVGVKSMVVGRYVSQIKEKLVTRIYRGVEPQLPNWFAVTKTRNGAGGGNKVVDDCYIPNYLLPKTQPELQWAWTNMDQYISACLNLAERKRLVAQHLTHVSQTQEQNKENQNPNSDAPVIRSKTSARYMELVGWLVDRGITSEKQWIQEDQASYISFNAASNSRSQIKAALDNASKIMSLTKTAPDYLVGQNPPEDISSNRIYRILEMNGYDPQYAASVFLGWAQKKFGKRNTIWLFGPATTGKTNIAEAIAHAVPFYGCVNWTNENFPFNDCVDKMVIWWEEGKMTAKVVESAKAILGGSKVRVDQKCKSSAQIDPTPVIVTSNTNMCAVIDGNSTTFEHQQPLQDRMFKFELTKRLEHDFGKVTKQEVKDFFRWASDHVTEVTHEFYVRKGGARKRPAPNDADISEPKRACPSVAQPSTSDAEAPVDYADRLARGQPLX

SEQ ID NO: 2443 - protein, 623 aa, Adeno-associated virus 4; identical to SEQ ID NO: 2441

SEQ ID NO: 2444 - protein, 544 aa, Adeno-associated virus 4
MSDDSEMRAAAGGAAVEGGQGADGVGNASGDWHCDSTWSEGHVTTTSTRTWVLPTYNNHLYKRLGESLQSNTYNGFSTPWGYFDFNRFHCHFSPRDWQRLINNNWGMRPKAMRVKIFNIQVKEVTTSNGETTVANNLTSTVQIFADSSYELPYVMDAGQEGSLPPFPNDVFMVPQYGYCGLVTGNTSQQQTDRNAFYCLEYFPSQMLRTGNNFEITYSFEKVPFHSMYAHSQSLDRLMNPLIDQYLWGLQSTTTGTTLNAGTATTNFTKLRPTNFSNFKKNWLPGPSIKQQGFSKTANQNYKIPATGSDSLIKYETHSTLDGRWSALTPGPPMATAGPADSKFSNSQLIFAGPKQNGNTATVPGTLIFTSEEELAATNATDTDMWGNLPGGDQSNSNLPTVDRLTALGAVPGMVWQNRDIYYQGPIWAKIPHTDGHFHPSPLIGGFGLKHPPPQIFIKNTPVPANPATTFSSTPVNSFITQYSTGQVSVQIDWEIQKERSKRWNPEVQFTSNYGQQNSLLWAPDAAGKYTEPRAIGTRYLTHHL

SEQ ID NO: 2445 - protein, 734 aa, Adeno-associated virus 4
MTDGYLPDWLEDNLSEGVREWWALQPGAPKPKANQQHQDNARGLVLPGYKYLGPGNGLDKGEPVNAADAAALEHDKAYDQQLKAGDNPYLKYNHADAEFQQRLQGDTSFGGNLGRAVFQAKKRVLEPLGLVEQAGETAPGKKRPLIESPQQPDSSTGIGKKGKQPAKKKLVFEDETGAGDGPPEGSTSGAMSDDSEMRAAAGGAAVEGGQGADGVGNASGDWHCDSTWSEGHVTTTSTRTWVLPTYNNHLYKRLGESLQSNTYNGFSTPWGYFDFNRFHCHFSPRDWQRLINNNWGMRPKAMRVKIFNIQVKEVTTSNGETTVANNLTSTVQIFADSSYELPYVMDAGQEGSLPPFPNDVFMVPQYGYCGLVTGNTSQQQTDRNAFYCLEYFPSQMLRTGNNFEITYSFEKVPFHSMYAHSQSLDRLMNPLIDQYLWGLQSTTTGTTLNAGTATTNFTKLRPTNFSNFKKNWLPGPSIKQQGFSKTANQNYKIPATGSDSLIKYETHSTLDGRWSALTPGPPMATAGPADSKFSNSQLIFAGPKQNGNTATVPGTLIFTSEEELAATNATDTDMWGNLPGGDQSNSNLPTVDRLTALGAVPGMVWQNRDIYYQGPIWAKIPHTDGHFHPSPLIGGFGLKHPPPQIFIKNTPVPANPATTFSSTPVNSFITQYSTGQVSVQIDWEIQKERSKRWNPEVQFTSNYGQQNSLLWAPDAAGKYTEPRAIGTRYLTHHL

SEQ ID NO: 2446 - protein, 598 aa, Adeno-associated virus 4
TAPGKKRPLIESPQQPDSSTGIGKKGKQPAKKKLVFEDETGAGDGPPEGSTSGAMSDDSEMRAAAGGAAVEGGQGADGVGNASGDWHCDSTWSEGHVTTTSTRTWVLPTYNNHLYKRLGESLQSNTYNGFSTPWGYFDFNRFHCHFSPRDWQRLINNNWGMRPKAMRVKIFNIQVKEVTTSNGETTVANNLTSTVQIFADSSYELPYVMDAGQEGSLPPFPNDVFMVPQYGYCGLVTGNTSQQQTDRNAFYCLEYFPSQMLRTGNNFEITYSFEKVPFHSMYAHSQSLDRLMNPLIDQYLWGLQSTTTGTTLNAGTATTNFTKLRPTNFSNFKKNWLPGPSIKQQGFSKTANQNYKIPATGSDSLIKYETHSTLDGRWSALTPGPPMATAGPADSKFSNSQLIFAGPKQNGNTATVPGTLIFTSEEELAATNATDTDMWGNLPGGDQSNSNLPTVDRLTALGAVPGMVWQNRDIYYQGPIWAKIPHTDGHFHPSPLIGGFGLKHPPPQIFIKNTPVPANPATTFSSTPVNSFITQYSTGQVSVQIDWEIQKERSKRWNPEVQFTSNYGQQNSLLWAPDAAGKYTEPRAIGTRYLTHHL

SEQ ID NO: 2447 - DNA, 129 bp, Adeno-associated virus 4
ttggccactccctctatgcgcgctcgctcactcactcggccctgcggccagaggccggcagtctggagacctttggtgtccagggcagggccgagtgagtgagcgagcgcgcatagagggagtggccaa

SEQ ID NO: 2448 - DNA, 125 bp, Adeno-associated virus 4
ttggccactccctctatgcgcgctcgctcactcactcggccctggagaccaaaggtctccagactgccggcctctggccggcagggccgagtgagtgagcgagcgcgcatagagggagtggccaa

SEQ ID NO: 2449 - DNA, 4768 bp, Adeno-associated virus 4
  modified_base (3009)..(3009): a, c, g, or t
  misc_feature (3009)..(3009): n is a, c, g, or t
ttggccactccctctatgcgcgctcgctcactcactcggccctggagaccaaaggtctccagactgccggcctctggccggcagggccgagtgagtgagcgagcgcgcatagagggagtggccaactccatcatctaggtttgcccactgacgtcaatgtgacgtcctagggttagggaggtccctgtattagcagtcacgtgagtgtcgtatttcgcggagcgtagcggagcgcataccaagctgccacgtcacagccacgtggtccgtttgcgacagtttgcgacaccatgtggtcaggagggtatataaccgcgagtgagccagcgaggagctccattttgcccgcgaattttgaacgagcagcagccatgccggggttctacgagatcgtgctgaaggtgcccagcgacctggacgagcacctgcccggcatttctgactcttttgtgagctgggtggccgagaaggaatgggagctgccgccggattctgacatggacttgaatctgattgagcaggcacccctgaccgtggccgaaaagctgcaacgcgagttcctggtcgagtggcgccgcgtgagtaaggccccggaggccctcttctttgtccagttcgagaagggggacagctacttccacctgcacatcctggtggagaccgtgggcgtcaaatccatggtggtgggccgctacgtgagccagattaaagagaagctggtgacccgcatctaccgcggggtcgagccgcagcttccgaactggttcgcggtgaccaagacgcgtaatggcgccggaggcgggaacaaggtggtggacgactgctacatccccaactacctgctccccaagacccagcccgagctccagtgggcgtggactaacatggaccagtatataagcgcctgtttgaatctcgcggagcgtaaacggctggtggcgcagcatctgacgcacgtgtcgcagacgcaggagcagaacaaggaaaaccagaaccccaattctgacgcgccggtcatcaggtcaaaaacctccgccaggtacatggagctggtcgggtggctggtggaccgcgggatcacgtcagaaaagcaatggatccaggaggaccaggcgtcctacatctccttcaacgccgcctccaactcgcggtcacaaatcaaggccgcgctggacaatgcctccaaaatcatgagcctgacaaagacggctccggactacctggtgggccagaacccgccggaggacatttccagcaaccgcatctaccgaatcctcgagatgaacgggtacgatccgcagtacgcggcctccgtcttcctgggctgggcgcaaaagaagttcgggaagaggaacaccatctggctctttgggccggccacgacgggtaaaaccaacatcgcggaagccatcgcccacgccgtgcccttctacggctgcgtgaactggaccaatgagaactttccgttcaacgattgcgtcgacaagatggtgatctggtgggaggagggcaagatgacggccaaggtcgtagagagcgccaaggccatcctgggcggaagcaaggtgcgcgtggaccaaaagtgcaagtcatcggcccagatcgacccaactcccgtgatcgtcacctccaacaccaacatgtgcgcggtcatcgacggaaactcgaccaccttcgagcaccaacaaccactccaggaccggatgttcaagttcgagctcaccaagcgcctggagcacgactttggcaaggtcaccaagcaggaagtcaaagactttttccggtgggcgtcagatcacgtgaccgaggtgactcacgagttttacgtcagaaagggtggagctagaaagaggcccgcccccaatgacgcagatataagtgagcccaagcgggcctgtccgtcagttgcgcagccatcgacgtcagacgcggaagctccggtggactacgcggacaggtaccaaaacaaatgttctcgtcacgtgggtatgaatctgatgctttttccctgccggcaatgcgagagaatgaatcagaatgtggacatttgcttcacgcacggggtcatggactgtgccgagtgcttccccgtgtcagaatctcaacccgtgtctgtcgtcagaaagcggacgtatcagaaactgtgtccgattcatcacatcatggggagggcgcccgaggtggcctgctcggcctgcgaactggccaatgtggacttggatgactgtgacatggaacaataaatgactcaaaccagatatgactgacggttaccttccagattggctagaggacaacctctctgaaggcgttcgagagtggtgggcgctgcaacctggagcccctaaacccaaggcaaatcaacaacatcaggacaacgctcggggtcttgtgcttccgggttacaaatacctcggacccggcaacggactcgacaagggggaacccgtcaacgcagcggacgcggcagccctcgagcacgacaaggcctacgaccagcagctcaaggccggtgacaacccctacctcaagtacaaccacgccgacgcggagttccagcagcggcttcagggcgacacaccgtttgggggcaacctcggcagagcagtcttccaggccaaaaagagggttcttgaacctcttggtctggttgagcaagcgggtgagacggctcctggaaagaagagaccgttgattgaatccccccagcagcccgactcctccacgggtatcggcaaaaaaggcaagcagccggctaaaaagaagctcgttttcgaagacgaaactggagcaggcgacggaccccctgagggatcaacttccggagccatgtctgatgacagtgagatgcgtgcagcagctggcggagctgcagtcgagggsggacaaggtgccgatggagtgggtaatgcctcgggtgattggcattgcgattccacctggtctgagggccacgtcacgaccaccagcaccagaacctgggtcttgcccacctacaacaaccacctntacaagcgactcggagagagcctgcagtccaacacctacaacggattctccaccccctggggatactttgacttcaaccgcttccactgccacttctcaccacgtgactggcagcgactcatcaacaacaactggggcatgcgacccaaagccatgcgggtcaaaatcttcaacatccaggtcaaggaggtcacgacgtcgaacggcgagacaacggtggctaataaccttaccagcacggttcagatctttgcggactcgtcgtacgaactgccgtacgtgatggatgcgggtcaagagggcagcctgcctccttttcccaacgacgtctttatggtgccccagtacggctactgtggactggtgaccggcaacacttcgcagcaacagactgacagaaatgccttctactgcctggagtactttccttcgcagatgctgcggactggcaacaactttgaaattacgtacagttttgagaaggtgcctttccactcgatgtacgcgcacagccagagcctggaccggctgatgaaccctctcatcgaccagtacctgtggggactgcaatcgaccaccaccggaaccaccctgaatgccgggactgccaccaccaactttaccaagctgcggcctaccaacttttccaactttaaaaagaactggctgcccgggccttcaatcaagcagcagggcttctcaaagactgccaatcaaaactacaagatccctgccaccgggtcagacagtctcatcaaatacgagacgcacagcactctggacggaagatggagtgccctgacccccggacctccaatggccacggctggacctgcggacagcaagttcagcaacagccagctcatctttgcggggcctaaacagaacggcaacacggccaccgtacccgggactctgatcttcacctctgaggaggagctggcagccaccaacgccaccgatacggacatgtggggcaacctacctggcggtgaccagagcaacagcaacctgccgaccgtggacagactgacagccttgggagccgtgcctggaatggtctggcaaaacagagacatttactaccagggtcccatttgggccaagattcctcataccgatggacactttcacccctcaccgctgattggtgggtttgggctgaaacacccgcctcctcaaatttttatcaagaacaccccggtacctgcgaatcctgcaacgaccttcagctctactccggtaaactccttcattactcagtacagcactggccaggtgtcggtgcagattgactgggagatccagaaggagcggtccaaacgctggaaccccgaggtccagtttacctccaactacggacagcaaaactctctgttgtgggctcccgatgcggctgggaaatacactgagcctagggctatcggtacccgctacctcacccaccacctgtaataacctgttaatcaataaaccggtttattcgtttcagttgaactttggtctccgtgtccttcttatcttatctcgtttccatggctactgcgtacataagcagcggcctgcggcgcttgcgcttcgcggtttacaactgccggttaatcagtaacttctggcaaaccatgatgatggagttggccactccctctatgcgcgctcgctcactcactcggccctggagaccaaaggtctccagactgccggcctctggccggcagggccgagtgagtgagcgagcgcgcatagagggagtggccaa

SEQ ID NO: 2450 - DNA, 3098 bp, Adeno-associated virus
gaattcgccctttctacggctgcgtcaactggaccaatgagaactttcccttcaacgattgcgtcgacaagatggtgatctggtgggaggagggcaagatgacggccaaggtcgtggagtccgccaaggccattctcggcggcagcaaggtgcgcgtggaccaaaagtgcaagtcttccgcccagatcgatcccacccccgtgatcgtcacttccaacaccaacatgtgcgctgtgattgacgggaacagcaccaccttcgagcaccagcagccgttacaagaccggatgttcaaatttgaactcacccgccgtctggagcacgactttggcaaggtgacaaagcaggaagtcaaagagttcttccgctgggcgcaggatcacgtgaccgaggtggcgcatgagttctacgtcagaaagggtggagccaacaagagacccgcccccgatgacgcggataaaagcgagcccaagcgggcctgcccctcagtcgcggatccatcgacgtcagacgcggaaggagctccggtggactttgccgacaggtaccaaaacaaatgttctcgtcacgcgggcatgcttcagatgctgtttccctgcaagacatgcgagagaatgaatcagaatttcaacatttgcttcacgcacgggaccagagactgttcagaatgtttccccggcgtgtcagaatctcaaccggtcgtcagaaagaggacgtatcggaaactctgtgccattcatcatctgctggggcgggctcccgagattgcttgctcggcctgcgatctggtcaacgtggacctggatgaccgtgtttctgagcaataaatgacttaaaccaggtatggctgccgatggttatcttccagattggctcgaggacaacctctctgagggcattcgcgagtggtgggacttgaaacctggagccccgaaacccaaagccaaccagcaaaagcaggacgacggccggggtctggtgcttcctggctacaagtacctcggacccttcaacggactcgacaagggagagccggtcaacgaggcagacgccgcggccctcgagcacgacaaggcctacgacaagcagctcgagcagggggacaacccgtacctcaagtacaaccacgccgacgccgagtttcaggagcgtcttcaagaagatacgtcttttgggggcaacctcgggcgagcagtcttccaggccaagaagcgggttctcgaacctctcggtctggttgaggaaggcgctaagacggctcctggaaagaagagacccatagaatcccccgactcctccacgggcatcggcaagaaaggccagcagcccgctaaaaagaagctcaactttgggcagactggcgactcagagtcagtgcccgacccccaacctctcggagaacctcccgccgcgccctcaggtctgggatctggtacaatggctgcaggcggtggcgcaccaatggcagacaataacgaaggcgccgacggagtgggtaatgcctccggaaattggcattgcgattccacatggctgggcgacagagtcatcaccaccagcacccgcacctgggccctgcccacctacaacaaccacctctacaagcagatatcaagtcagagcggggctaccaacgacaaccacttcttcggctacagcaccccctggggctattttgacttcaacagattccactgccacttctcaccacgtgactggcagcgactcatcaacaacaactggggattccggcccagaaagctgcggttcaagttgttcaacatccaggtcaaggaggtcacgacgaacgacggcgttacgaccatcgctaataaccttaccagcacgattcaggtcttctcggactcggagtaccaactgccgtacgtcctcggctctgcgcaccagggctgcctccctccgttccctgcggacgtgttcatgattcctcagtacggatatctgactctaaacaacggcagtcagtctgtgggacgttcctccttctactgcctggagtactttccttctcagatgctgagaacgggcaataactttgaattcagctacacctttgaggaagtgcctttccacagcagctatgcgcacagccagagcctggaccggctgatgaatcccctcatcgaccagtacctgtactacctggcccggacccagagcactacggggtccacaagggagctgcagttccatcaggctgggcccaacaccatggccgagcaatcaaagaactggctgcccggaccctgttatcggcagcagagactgtcaaaaaacatagacagcaacaacaacagtaactttgcctggaccggggccactaaataccatctgaatggtagaaattcattaaccaacccgggcgtagccatggccaccaacaaggacgacgaggaccagttctttcccatcaacggagtgctggtttttggcgaaacgggggctgccaacaagacaacgctggaaaacgtgctaatgaccagcgaggaggagatcaaaaccaccaatcccgtggctacagaagaatacggtgtggtctccagcaacctgcaatcgtctacggccggaccccagacacagactgtcaacagccagggggctctgcccggcatggtctggcagaaccgggacgtgtacctgcagggtcccatctgggccaaaattcctcacacggacggcaactttcacccgtctcccctgatgggcggatttggactcaaacacccgcctcctcaaattctcatcaaaaacaccccggtacctgctaatcctccagaggtgtttactcctgccaagtttgcctcatttatcacgcagtacagcaccggccaggtcagcgtggagatcgagtgggaactgcagaaagaaaacagcaaacgctggaatccagagattcagtacacctcaaattatgccaagtctaataatgtggaatttgctgtcaacaacgaaggggtttatactgagcctcgccccattggcacccgttacctcacccgtaacctgtaattgcctgttaatcaataaaccggttaattcgtttcagttgaactttggtctctgcgaagggcgaattc

SEQ ID NO: 2451 - protein, 728 aa, Artificial Sequence
  Synthetic polypeptide
MAADGYLPDWLEDNLSEGIREWWDLKPGAPKPKANQQKQDDGRGLVLPGYKYLGPFNGLDKGEPVNEADAAALEHDKAYDKQLEQGDNPYLKYNHADAEFQERLQEDTSFGGNLGRAVFQAKKRVLEPLGLVEEGAKTAPGKKRPIESPDSSTGIGKKGQQPAKKKLNFGQTGDSESVPDPQPLGEPPAAPSGLGSGTMAAGGGAPMADNNEGADGVGNASGNWHCDSTWLGDRVITTSTRTWALPTYNNHLYKQISSQSGATNDNHFFGYSTPWGYFDFNRFHCHFSPRDWQRLINNNWGFRPRKLRFKLFNIQVKEVTTNDGVTTIANNLTSTIQVFSDSEYQLPYVLGSAHQGCLPPFPADVFMIPQYGYLTLNNGSQSVGRSSFYCLEYFPSQMLRTGNNFEFSYTFEEVPFHSSYAHSQSLDRLMNPLIDQYLYYLARTQSTTGSTRELQFHQAGPNTMAEQSKNWLPGPCYRQQRLSKNIDSNNNSNFAWTGATKYHLNGRNSLTNPGVAMATNKDDEDQFFPINGVLVFGETGAANKTTLENVLMTSEEEIKTTNPVATEEYGVVSSNLQSSTAGPQTQTVNSQGALPGMVWQNRDVYLQGPIWAKIPHTDGNFHPSPLMGGFGLKHPPPQILIKNTPVPANPPEVFTPAKFASFITQYSTGQVSVEIEWELQKENSKRWNPEIQYTSNYAKSNNVEFAVNNEGVYTEPRPIGTRYLTRNL

SEQ ID NO: 2452 - DNA, 2495 bp, Artificial Sequence
  Synthetic polynucleotide
gaattcgccctttctacggctgcgtcaactagaccaatgagaactttcccttcaacgattgcgtcgacaagatggtgatctggtgggaggagggcaagatgacggccaaggtcgtggagtccgccaaggccattcatcatctgctggggcgggctcccgagattgcttgctcggcctgcgatctggtcaacgtggacctggatgactgtgtttctgagcaataaatgacttaaaccaggtatggctgccgatggttatcttccagattggctcgaggacaacctctctgagggcattcgcgagtggtgggacttgaaacctggagccccgaaacccaaagccaaccagcaaaagcaggacgacggccggggtctggtgcttcctggctacaagtacctcggacccttcaacggactcgacaagggagagccggtcaacgaggcagacgccgcggccctcgagcacgacaaggcctacgacaagcagctcgagcagggggacaacccgtacctcaagtacaaccacgccgacgccgagtttcaggagcgtcttcaagaagatacgtcttttgggggcaacctcgggcgagcagtcttccaggccaagaagcgggttctcgaacctctcggtctggttgaggaaggcgctaagacggctcctggaaagaagagacccatagaatcccccgactcctccacgggcatcggcaagaaaggccagcagcccgctaaaaagaagctcaactttgggcagactggcgactcagagtcagtgcccgaccctcaaccaatcggagaaccccccgcaggcccctctggtctgggatctggtacaatggctgcaggcggtggcgctccaatggcagacaataacgaaggcgccgacggagtgggtaatgcctccggaaattggcattgcgattccacatggctgggcgacagagtcatcaccaccagcacccgcacctgggccctgcccacctacaacaaccacctctacaagcagatatcaagtcagagcggggctaccaacgacaaccacttcttcggctacagcaccccctggggctattttgacttcaacagattccactgccacttctcaccacgtgactggcagcgactcatcaacaacaactggggattccggcccagaaagctgcggttcaagttgttcaacatccaggtcaaggaggtcacgacgaacgacggcgttacgaccatcgctaataaccttaccagcacgattcaggtcttctcggactcggagtaccaactgccgtacgtcctcggctctgcgcaccagggctgcctccctccgttccctgcggacgtgttcatgattcctcagtacggatatctgactctaaacaacggcagtcagtctgtgggacgttcctccttctactgcctggagtactttccttctcagatgctgagaacgggcaataactttgaattcagctacacctttgaggaagtgcctttccacagcagctatgcgcacagccagagcctggaccggctgatgaatcccctcatcgaccagtacctgtactacctggcccggacccagagcactacggggtccacaagggagctgcagttccatcaggctgggcccaacaccatggccgagcaatcaaagaactggctgcccggaccctgttatcggcagcagagactgtcaaaaaacatagacagcaacaacaccagtaactttgcctggaccggggccactaaataccatctgaatggtagaaattcattaaccaacccgggcgtagccatggccaccaacaaggacgacgaggaccagttctttcccatcaacggagtgctggtttttggcaaaacgggggctgccaacaagacaacgctggaaaacgtgctaatgaccagcgaggaggagatcaaaaccaccaatcccgtggctacagaacagtacggtgtggtctccagcaacctgcaatcgtctacggccggaccccagacacagactgtcaacagccagggggctctgcccggcatggtctggcagaaccgggacgtgtacctgcagggtcccatctgggccaaaattcctcacacggacggcaactttcacccgtctcccctgatgggcggatttggactcaaacacccgcctcctcaaattctcatcaaaaacaccccggtacctgctaatcctccagaggtgtttactcctgccaagtttgcctcatttatcacgcagtacagcaccggccaggtcagcgtggagatcgagtgggaactgcagaaagaaaacagcaaacgctggaatccagagattcagtacacctcaaattatgccaagtctaataatgtggaatttgctgtcaacaacgaaggggtttatactgagcctcgccccattggcacccgttacctcacccgtaacctgtaattgcctgttaatcaataaaccggttaattcgtttcagttgaactttggtctctgcgaagggcgaattc

SEQ ID NO: 2453 - protein, 728 aa, Artificial Sequence
  Synthetic polypeptide
MAADGYLPDWLEDNLSEGIREWWDLKPGAPKPKANQQKQDDGRGLVLPGYKYLGPFNGLDKGEPVNEADAAALEHDKAYDKQLEQGDNPYLKYNHADAEFQERLQEDTSFGGNLGRAVFQAKKRVLEPLGLVEEGAKTAPGKKRPIESPDSSTGIGKKGQQPAKKKLNFGQTGDSESVPDPQPIGEPPAGPSGLGSGTMAAGGGAPMADNNEGADGVGNASGNWHCDSTWLGDRVITTSTRTWALPTYNNHLYKQISSQSGATNDNHFFGYSTPWGYFDFNRFHCHFSPRDWQRLINNNWGFRPRKLRFKLFNIQVKEVTTNDGVTTIANNLTSTIQVFSDSEYQLPYVLGSAHQGCLPPFPADVFMIPQYGYLTLNNGSQSVGRSSFYCLEYFPSQMLRTGNNFEFSYTFEEVPFHSSYAHSQSLDRLMNPLIDQYLYYLARTQSTTGSTRELQFHQAGPNTMAEQSKNWLPGPCYRQQRLSKNIDSNNTSNFAWTGATKYHLNGRNSLTNPGVAMATNKDDEDQFFPINGVLVFGKTGAANKTTLENVLMTSEEEIKTTNPVATEQYGVVSSNLQSSTAGPQTQTVNSQGALPGMVWQNRDVYLQGPIWAKIPHTDGNFHPSPLMGGFGLKHPPPQILIKNTPVPANPPEVFTPAKFASFITQYSTGQVSVEIEWELQKENSKRWNPEIQYTSNYAKSNNVEFAVNNEGVYTEPRPIGTRYLTRNL

SEQ ID NO: 2454 - DNA, 2504 bp, Artificial Sequence
  Synthetic polynucleotide
gaattcgccctttctacggctgcgtcaactggaccaatgagaactttcccttcaacgattgcgtcgacaagatggtgatctggtgggaggagggcaagatgacggccaaggtcgtggagtccgccaaggccattcatcatctgctggggcgggctcccgagattgcttgctcggcctgcgatctggtcaacgtggacctggatgactgtgtttctgagcaataaatgacttaaaccaggtatggctgccgatggttatcttccagattggctcgaggacaacctctctgagggcattcgcgagtggtgggacttgaaacctggagccccgaaacccaaagccaaccagcaaaagcaggacgacggccggggtctggtgcttcctggctacaagtacctcggacccttcaacggactcgacaagggagagccggtcaacgaggcagacgccgcggccctcgagcacgacaaggcctacgacaagcagctcgagcagggggacaacccgtacctcaagtacaaccacgccgacgccgagtttcaggagcgtcttcaagaagatacgtcttttgggggcaacctcgggcgagcagtcttccaggccaagaagcgggttctcgaacctctcggtctggttgaggaaggcgctaagacggctcctggaaagaagagacccatagaatcccccgactcctccacgggcatcggcaagaaaggccagcagcccgctaaaaagaagctcaactttgggcagactggcgactcagagtcagtgcccgaccctcaaccaatcggagaaccccccgcaggcccctctggtctgggatctggtacaatggctgcaggcggtggcgctccaatggcagacaataacgaaggcgccgacggagtgggtaatgcctccggaaattggcattgcgattccacatggctgggcgacagagtcatcaccaccagcacccgcacctgggccctgcccacctacaacaaccacctctacaagcagatatcaagtcagagcggggctaccaacgacaaccacttcttcggctacagcaccccctggggctattttgacttcaacagattccactgccacttctcatcacgtgactggcagcgactcatcaacaacaactggggattccggcccaagagactcaacttcaagctcttcaacatccaggtcaaggaggtcacgcagaatgaaggcaccaagaccatcgccaataaccttaccagcacgattcaggtctttacggactcggaataccggctcccgtacgtcctcggctctgcgcaccagggctgcctgcctccgttcccggcggacgtcttcatgattcctcagtacgggtacctgactctgaacaacggcagtcaggccgtgggccgttcctccttctactgcctggagtactttccttctcaaatgctgagaacgggcaacaactttgagttcagctaccagtttgaggacgtgccttttcacagcagctacgcgcacagccaaagcctggaccggctgatgaaccccctcatcgaccagtacctgtactacctgtctcggactcagtccacgggaggtaccgcaggaactcagcagttgctattttctcaggccgggcctaataacatgtcggctcaggccaaaaactggctacccgggccctgctaccggcagcaacgcgtctccacgacactgtcgcaaaataacaacagcaactttgcttggaccggtgccaccaagtatcatctgaatggcagagactctctggtaaatcccggtgtcgctatggcaacgcacaaggacgacgaagagcgattttttccatccagcggagtcttgatgtttgggaaacagggagctggaaaagacaacgtggactatagcagcgttatgctaaccagtgaggaagaaatcaaaaccaccaacccagtggccacagaacagtacggcgtggtggccgataacctgcaacagcaaaacgccgctcctattgtaggggccgtcaacagtcaaggagccttacctggcatggtctggcagaaccgggacgtgtacctgcagggtcctatctgggccaagattcctcacacggacggcaactttcatccttcgccgctgatgggaggctttggactgaaacacccgcctcctcagatcctgattaagaatacacctgttcccgcggatcctccaactaccttcagtcaagccaagccggcgtcgttcatcacgcagtacagcaccggacaggtcagcgtggaaattgaatgggagctgcagaaagagaacagcaagcgctggaacccagagattcagtatacttccaactactacaaatctacaaatgtggactttgctgtcaatactgagggtacttattcagagcctcgccccattggcacccgttacctcacccgtaacctgtaattgcctgttaatcaataaaccggttaattcgtttcagttgaactttggtctctgcgaagggcgaattc

SEQ ID NO: 2455 - protein, 731 aa, Artificial Sequence
  Synthetic polypeptide
MAADGYLPDWLEDNLSEGIREWWDLKPGAPKPKANQQKQDDGRGLVLPGYKYLGPFNGLDKGEPVNEADAAALEHDKAYDKQLEQGDNPYLKYNHADAEFQERLQEDTSFGGNLGRAVFQAKKRVLEPLGLVEEGAKTAPGKKRPIESPDSSTGIGKKGQQPAKKKLNFGQTGDSESVPDPQPIGEPPAGPSGLGSGTMAAGGGAPMADNNEGADGVGNASGNWHCDSTWLGDRVITTSTRTWALPTYNNHLYKQISSQSGATNDNHFFGYSTPWGYFDFNRFHCHFSSRDWQRLINNNWGFRPKRLNFKLFNIQVKEVTQNEGTKTIANNLTSTIQVFTDSEYRLPYVLGSAHQGCLPPFPADVFMIPQYGYLTLNNGSQAVGRSSFYCLEYFPSQMLRTGNNFEFSYQFEDVPFHSSYAHSQSLDRLMNPLIDQYLYYLSRTQSTGGTAGTQQLLFSQAGPNNMSAQAKNWLPGPCYRQQRVSTTLSQNNNSNFAWTGATKYHLNGRDSLVNPGVAMATHKDDEERFFPSSGVLMFGKQGAGKDNVDYSSVMLTSEEEIKTTNPVATEQYGVVADNLQQQNAAPIVGAVNSQGALPGMVWQNRDVYLQGPIWAKIPHTDGNFHPSPLMGGFGLKHPPPQILIKNTPVPADPPTTFSQAKPASFITQYSTGQVSVEIEWELQKENSKRWNPEIQYTSNYYKSTNVDFAVNTEGTYSEPRPIGTRYLTRNL

SEQ ID NO: 2456 - DNA, 3128 bp, Artificial Sequence
  Synthetic polynucleotide
gaattcgccctttctacggctgcgtcaactggaccaatgagaactttcccttcaacgattgcgtcgacaagatggtgatctggtgggaggagggcaagatgacggccaaggtcgtggagtccgccaaggccattctcggcggcagcaaggtgcgcgtggaccaaaagtgcaagtcttccgcccagatcgatcccacccccgtgatcgtcacttccaacaccaacatgtgcgccgtgattgacgggaacagcaccaccttcgagcaccagcagccgttacaagaccggatgttcaaatttgaactcacccgccgtctggagcacgactttggcaaggtgacaaagcaggaagtcaaagagttcttccgctgggcgcaggatcacgtgaccgaggtggcgcatgagttctacgtcagaaagggtggagccaacaagagacccgcccccgatgacgcggataaaagcgagcccaagcgggcctgcccctcagtcgcggatccatcgacgtcagacgcggaaggagctccggtggactttgccgacaggtaccaaaacaaatgttctcgtcacgcgggcatgcttcagatgctgtttccctgcaagacatgcgagagaatgaatcagaatttcaacatttgcttcacgcacgggaccagagactgttcagaatgtttccccggcgtgtcagaatctcaaccggtcgtcagaaagaggacgtatcggaaactctgtgccattcatcatctgctagggcgggctcccgagattgcttgctcggcctgcgatctggtcaacgtggacctggatgactgtgtttctgagcaataaatgacttaaaccaggtatggctgccgatggttatcttccagattggctcgaggacaacctctctgagggcattcgcgagtggtgggacttgaaacctggagccccgaaacccaaagccaaccagcaaaagcaggacgacggccggggtctggtgcttcctggctacaagtacctcggacccttcaacggactcgacaagggggagcccgtcaacgcggcggacgcagcggccctcgagcacgacaaggcctacgaccagcagctcaaagcgggtgacaatccgtacctgcggtataaccacgccgacgccgagtttcaggagcgtctgcaagaagatacgtcttttgggggcaacctcgggcgagcagtcttccaggccaagaagcgggttctcgaacctctcggtctggttgaggaaggcgctaagacggctcctggaaagaagagaccggtagagccatcaccccagcgttctccagactcctctacgggcatcggcaagacaggccagcagcccgcgaaaaagagactcaactttgggcagactggcgactcagagtcagtgcccgaccctcaaccaatcggagaaccccccgcaggcccctctggtctgggatctggtacaatggctgcaggcggtggcgctccaatggcagacaataacgaaggcgccgacggagtgggtagttcctcaggaaattggcattgcgattccacatggctgggcgacagagtcatcaccaccagcacccgaacctgggccctccccacctacaacaaccacctctacaagcaaatctccaacgggacatcgggaggaagcaccaacgacaacacctacttcggctacagcaccccctgggggtattttgactttaacagattccactgccacttctcaccacgtgactggcagcgactcatcaacaacaactggggattccggcccaagagactcaacttcaagctcttcaacatccaggtcaaggaggtcacgcagaatgaaggcaccaagaccatcgccaataaccttaccagcacgattcaggtctttacggactcggaataccagctcccgtacgtcctcggctctgcgcaccagggctgcctgcctccgttcccggcggacgtcttcatgattcctcagtacgggtacctgactctgaacaacggcagtcaggccgtgggccgttcctccttctactgcctggagtactttccttctcaaatgctgagaacgggcaacaactttgagttcagctaccagtttgaggacgtgccttttcacagcagctacgcgcacagccaaagcctggaccggctgatgaaccccctcatcgaccagtacctgtactacctgtctcggactcagtccacgggaggtaccgcaggaactcagcagttgctattttctcaggccgggcctaataacatgtcggctcaggccaaaaactggctacccgggccctgctaccggcagcaacgcgtctccacgacactgtcgcaaaataacaacagcaactttgcttggaccggtgccaccaagtatcatctgaatggcagagactctctggtaaatcccggtgtcgctatggcaacgcacaaggacgacgaagagcgattttttccatccagcggagtcttgatgtttgggaaacagggagctggaaaagacaacgtggactatagcagcgttatgctaaccagtgaggaagaaatcaaaaccaccaacccagtggccacagaacagtacggcgtggtggccgataacctgcaacagcaaaacgccgctcctattgtaggggccgtcaacagtcaaggagccttacctggcatggtctggcagaaccgggacgtgtacctgcagggtcctatctgggccaagattcctcacacggacggcaactttcatccttcgccgctgatgggaggctttggactgaaacacccgcctcctcagatcctgattaagaatacacctgttcccgcggatcctccaactaccttcagtcaagccaagctggcgtcgttcatcacgcagtacagcaccggacaggtcagcgtggaaattgaatgggagctgcagaaagagaacagcaagcgctggaacccagagattcagtatacttccaactactacaaatctacaaatgtggactttgctgtcaatactgagggtacttattcagagcctcgccccattggcacccgttacctcacccgtaacctgtaattgcctgttaatcaataaaccggctaattcgtttcagttgaactttggtctctgcgaagggcgaattc

SEQ ID NO: 2457 - protein, 738 aa, Artificial Sequence
  Synthetic polypeptide
MAADGYLPDWLEDNLSEGIREWWDLKPGAPKPKANQQKQDDGRGLVLPGYKYLGPFNGLDKGEPVNAADAAALEHDKAYDQQLKAGDNPYLRYNHADAEFQERLQEDTSFGGNLGRAVFQAKKRVLEPLGLVEEGAKTAPGKKRPVEPSPQRSPDSSTGIGKTGQQPAKKRLNFGQTGDSESVPDPQPIGEPPAGPSGLGSGTMAAGGGAPMADNNEGADGVGSSSGNWHCDSTWLGDRVITTSTRTWALPTYNNHLYKQISNGTSGGSTNDNTYFGYSTPWGYFDFNRFHCHFSPRDWQRLINNNWGFRPKRLNFKLFNIQVKEVTQNEGTKTIANNLTSTIQVFTDSEYQLPYVLGSAHQGCLPPFPADVFMIPQYGYLTLNNGSQAVGRSSFYCLEYFPSQMLRTGNNFEFSYQFEDVPFHSSYAHSQSLDRLMNPLIDQYLYYLSRTQSTGGTAGTQQLLFSQAGPNNMSAQAKNWLPGPCYRQQRVSTTLSQNNNSNFAWTGATKYHLNGRDSLVNPGVAMATHKDDEERFFPSSGVLMFGKQGAGKDNVDYSSVMLTSEEEIKTTNPVATEQYGVVADNLQQQNAAPIVGAVNSQGALPGMVWQNRDVYLQGPIWAKIPHTDGNFHPSPLMGGFGLKHPPPQILIKNTPVPADPPTTFSQAKLASFITQYSTGQVSVEIEWELQKENSKRWNPEIQYTSNYYKSTNVDFAVNTEGTYSEPRPIGTRYLTRNL

SEQ ID NO: 2458 - DNA, 3084 bp, Artificial Sequence
  Synthetic polynucleotide
gaattcgccctttctacggctgcatcaactggaccaatgagaactttcccttcaacgattgcgtcgacaagatggtgatctggtgggaggagggcaagatgacggccaaggtcgtggagtccgccaaggccattctcggcggcagcaaggtgcgcgtggaccaaaagtgcaagtcgtccgcccagatcgaccccacccccgtgatcgtcacctccaacaccaacatgtgcgccgtgattgacgggaacagcaccaccttcgagcaccagcagccgttgcaggaccggatgttcaagttcgaactcacccgccgtctggagcacgactttggcaaggtgaccaagcaggaagtcaaagagttcttccgctgggcgcaggatcacgtgaccgaggtggcgcatgagttctacgtcagaaagggcggagccagcaaaagacccgcccccgatgacgcggatataagcgagcccaagcgggcctgcccctcagtcgcggatccatcgacgtcagacgcggaaggagctccggtggactttgccgacaggtaccaaaacaaatgttctcgtcacgcgggcatgcttcagatgctgtttccctgcaaaacgtgcgagaaaatgaatcagaatttcaacatttgcttcacgcacggggtcagagactgctcagaatgtttccccggtgcatcagaatctcaaccggtcgtcagaaaaaaaacgtatcagaaactgtgtgccattcatcatctgctggggcgggcacccgagattgcttgctcggcctgcgatctggtcaacgtggacctggacgactgtgtttctgagcaataaatgacttaaaccaggtatggctgccgatggttatcttccagattggcttgaggacaacctctctgagggcattcgcgagtggtgggacctgaaacctggagccccgaaacccaaagccaaccagcaaaagcaggacgacggccggggtctggtgcttcctggctacaagtacctcggacccttcaacggactcgacaagggggagcccgtcaacgcggcggacgcagcggccctcgagcacgacaaggcctacgaccagcagctcaaagcgggtgacaatccgtacctgcggtataaccacgccgacgccgagtttcaggagcgtctgcaagaagatacgtcttttgggggcaacctcgggcgagcagtcttccaggccaagaagcgggttctcgaacctctcggtctggttgaggaaggcgctaagacggctcctggaaagaagagaccggtagagccatcacctcagcgttcccccgactcctccacgggcatcggcaagaaaggccaccagcccgcgagaaagagactgaactttgggcagactggcgactcggagtcagtccccgaccctcaaccaatcggagaaccaccagcaggcccctctggtctgggatctggtacaatggctgcaggcggtggcgctccaatggcagacaataacgaaggcgccgacggagtgggtagttcctcaggaaattggcattgcgattccacatggctgggcgacagagtcatcaccaccagcacccgaacctgggccctgcccacctacaacaaccatctctacaagcaaatctccaacgggacatcgggaggaagcactaacgacaacacctactttggctacagcaccccctgggggtattttgacttcaacagattccactgccacttctcaccacgtgactggcagcgactcatcaacaataactggggattccggcccaagagactcaacttcaagctcttcaacatccaggtcaaggaggtcacgcagaatgaaggcaccaagaccatcgccaataaccttaccagcacgattcaggtgtttacggactcggaataccagctcccgtacgtccccggctctgcgcaccagggctgcctccctccgttcccggcggacgtcttcatgattcctcagtacgggtatctgaccctaaacaatggcagtcaggctgtgggccgttcctccttctactgcctggaatacttcccttctcaaatgctgaggacgggcaacaactttgaattcagctacaccttcgaggacgtgcctttccacagcagctacgcgcacagccagagcctggaccggctgatgaaccctctcatcgaccagtacctgtattacttatccagaactcagtccacaggaggaactcaaggtactcagcaattgttattttctcaagccgggcccgcaaacatgtcggctcaggccaagaactggctacctggaccgtgttaccgtcagcaacgagtttccacgacactgtcgcaaaacaacaacagcaattttgcttggaccggtgccaccaagtatcacctgaatggcagagactccctggttaatcccggcgttgccatggctacccacaaggacgacgaggagcgcttcttcccgtcaagcggagttctaatgtttggcaagcagggggctggaaaagacaatgtggactacagcagcgtgatgctcaccagcgaagaagaaattaaaactactaacccagtggctacagagcagtatggtgtggtggcagacaacctgcagcagaccaacggagctcccattgtgggaactgtcaacagccagggggccttacctggtatggtctggcaaaaccgggacgtgtacctgcagggccccatctgggccaaaattcctcacacggacggcaactttcatccttcgccgctgatgggaggctttggactgaaacacccgcctcctcagatcctggtgaaaaacactcctgttcctgcggatcctccgaccaccttcagccaggccaagctggcttcttttatcacgcagtacagcaccggacaggtcagcgtggaaatcgaatgggagctgcagaaagaaaacagcaagcgctggaacccagagattcagtatacttccaactactacaaatctacaaatgtggactttgctgtcaatactgagggtacttattcagagcctcgccccattggcactcgttatctcacccgtaatctgtaattgcttgttaatcaataaaccggt

SEQ ID NO: 2459 - protein, 738 aa, Artificial Sequence
  Synthetic polypeptide
MAADGYLPDWLEDNLSEGIREWWDLKPGAPKPKANQQKQDDGRGLVLPGYKYLGPFNGLDKGEPVNAADAAALEHDKAYDQQLKAGDNPYLRYNHADAEFQERLQEDTSFGGNLGRAVFQAKKRVLEPLGLVEEGAKTAPGKKRPVEPSPQRSPDSSTGIGKKGHQPARKRLNFGQTGDSESVPDPQPIGEPPAGPSGLGSGTMAAGGGAPMADNNEGADGVGSSSGNWHCDSTWLGDRVITTSTRTWALPTYNNHLYKQISNGTSGGSTNDNTYFGYSTPWGYFDFNRFHCHFSPRDWQRLINNNWGFRPKRLNFKLFNIQVKEVTQNEGTKTIANNLTSTIQVFTDSEYQLPYVPGSAHQGCLPPFPADVFMIPQYGYLTLNNGSQAVGRSSFYCLEYFPSQMLRTGNNFEFSYTFEDVPFHSSYAHSQSLDRLMNPLIDQYLYYLSRTQSTGGTQGTQQLLFSQAGPANMSAQAKNWLPGPCYRQQRVSTTLSQNNNSNFAWTGATKYHLNGRDSLVNPGVAMATHKDDEERFFPSSGVLMFGKQGAGKDNVDYSSVMLTSEEEIKTTNPVATEQYGVVADNLQQTNGAPIVGTVNSQGALPGMVWQNRDVYLQGPIWAKIPHTDGNFHPSPLMGGFGLKHPPPQILVKNTPVPADPPTTFSQAKLASFITQYSTGQVSVEIEWELQKENSKRWNPEIQYTSNYYKSTNVDFAVNTEGTYSEPRPIGTRYLTRNL

SEQ ID NO: 2460 - DNA, 3123 bp, Artificial Sequence
  Synthetic polynucleotide
gaattcgcccttggctgcgtcaactggaccaatgagaactttcccttcaacgattgcgtcgacaagatggtgatctggtgggaggagggcaagatgacggccaaggtcgtggagtccgccaaggccattctcggcggcagcaaggtgcgcgtggaccaaaagtgcaagtcgtccgcccagatcgaccccacccccgtgatcgtcacctccaacaccaacatgtgcgccgtgattgacgggaacagcaccaccttcgagcaccagcagccgttgcaggaccggatgttcaagttcgaactcacccgccgtctggagcacgactttggcaaggtgaccaagcaggaagtcaaagagttcttccgctgggcgcaggatcacgtgaccgaggtggcgcatgagttctacgtcagaaagggcggagccagcaaaagacccgcccccgatgacgcggatataagcgagcccaagcgggcctgcccctcagtcgcggatccatcgacgtcagacgcggaaggagctccggtggactttgccgacaggtaccaaaacaaatgttctcgtcacgcgggcatgctccagatgctgtttccctgcaaaacgtgcgagagaatgaatcagaatttcaacatttgcttcacgcacggggtcagagactgctcagaatgtttccccggtgcatcagaatctcaaccggtcgtcagaaaaaaaacgtatcagaaactgtgtgccattcatcatctgctggggcgggcacccgagattgcttgctcggcctgcgatctggtcaacgtggacctggacgactgtgtttctgagcaataaatgacttaaaccaggtatggctgccgatggttatcttccagattggcttgaggacaacctctctgagggcattcgcgagtggtgggacctgaaacctggagccccgaaacccaaagccaaccagcaaaagcaggacgacggccggggtctggtgcttcctggctacaagtacctcggacccttcaacggactcgacaagggggagcccgtcaacgcggcggacgcagcggccctcgagcacgacaaggcctacgaccagcagctcaaagcgggtgacaatccgtacctgcggtataaccacgccgacgccgagtttcaggagcgtctgcaagaagatacgtcttttgggggcaacctcgggcgagcagtcttccaggccaagaagcgggttctcgaacctctcggtctggttgaggaaggcgctaagacggctcctggaaagaagagaccggtagagccatcacctcagcgttcccccgactcctccacgggcatcggcaagaaaggccaccagcccgcgagaaagagactgaactttgggcagactggcgactcggagtcagtccccgaccctcaaccaatcggagaaccaccagcaggcccctctggtctgggatctggtacaatggctgcaggcggtggcgctccaatggcagacaataacgaaggcgccgacggagtgggtagttcctcaggaaattggcattgcgattccacatggctgggcgacagagtcatcaccaccagcacccgaacctgggccctgcccacctacaacaaccatctctacaagcaaatctccaacgggacatcgggaggaagcactaacgacaacacctactttggctacagcaccccctgggggtattttgacttcaacagattccactgccacttctcaccacgtgactggcagcgactcatcaacaataactggggattccggcccaagagactcaacttcaagctcttcaacatccaggtcaaggaggtcacgcagaatgaaggcaccaagaccatcgccaataaccttaccagcacgattcaggtgtttacggactcggaataccagctcccgtacgtcctcggctctgcgcaccagggctgcctccctccgttcccggcggacgtcttcatgattcctcagtacgggtatctgaccctaaacaatggcagtcaggctgtgggccgttcctccttctactgcctggaatacttcccttctcaaatgctgaggacgggcaacaactttgaattcagctacaccttcgaggacgtgcctttccacagcagctacgcgcacagccagagcctggaccggctgatgaaccctctcatcgaccagtacctgtattacttatccagaactcagtccacaggaggaactcaaggtactcagcaattgttattttctcaagccgggcccgcaaacatgtcggctcaggccaagaactggctacctggaccgtgttaccgtcagcaacgagtttccacgacactgtcgcaaaacaacaacagcaattttgcttggaccggtgccaccaagtatcacctgaatggcagagactccctggttaatcccggcgttgccatggctacccacaaggacgacgaggagcgcttcttcccgtcaagcggagttctaatgtttggcaagcagggggctggaaaagacaatgtggactacagcagcgtgatgctcaccagcgaagaagaaattaaaactactaacccagtggctacagagcagtatggtgtggtggcagacaacctgcagcagaccaacggagctcccattgtgggaactgtcaacagccagggggccttacctggtatggtctggcaaaaccgggacgtgtacctgcagggccccatctgggccaaaattcctcacacggacggcaactttcatccttcgccgctgatgggaggctttggactgaaacacccgcctcctcagatcctggtgaaaaacactcctgttcctgcggatcctccgaccaccttcagccaggccaagctggcttcttttatcacgcagtacagcaccggacaggtcagcgtggaaatcgaatgggagctgcagaaagaaaacagcaagcgctggaacccagagattcagtatacttccaactactacaaatctacaaatgtggactttgctgtcaatactgagggtacttattcagagcctcgccccattggcactcgttatctcacccgtaatctgtaattgcttgttaatcaataaaccggttaattcgtttcagttgaactttggtctctgcgaagggcgaattc

SEQ ID NO: 2461 - protein, 738 aa, Artificial Sequence
  Synthetic polypeptide
MAADGYLPDWLEDNLSEGIREWWDLKPGAPKPKANQQKQDDGRGLVLPGYKYLGPFNGLDKGEPVNAADAAALEHDKAYDQQLKAGDNPYLRYNHADAEFQERLQEDTSFGGNLGRAVFQAKKRVLEPLGLVEEGAKTAPGKKRPVEPSPQRSPDSSTGIGKKGHQPARKRLNFGQTGDSESVPDPQPIGEPPAGPSGLGSGTMAAGGGAPMADNNEGADGVGSSSGNWHCDSTWLGDRVITTSTRTWALPTYNNHLYKQISNGTSGGSTNDNTYFGYSTPWGYFDFNRFHCHFSPRDWQRLINNNWGFRPKRLNFKLFNIQVKEVTQNEGTKTIANNLTSTIQVFTDSEYQLPYVLGSAHQGCLPPFPADVFMIPQYGYLTLNNGSQAVGRSSFYCLEYFPSQMLRTGNNFEFSYTFEDVPFHSSYAHSQSLDRLMNPLIDQYLYYLSRTQSTGGTQGTQQLLFSQAGPANMSAQAKNWLPGPCYRQQRVSTTLSQNNNSNFAWTGATKYHLNGRDSLVNPGVAMATHKDDEERFFPSSGVLMFGKQGAGKDNVDYSSVMLTSEEEIKTTNPVATEQYGVVADNLQQTNGAPIVGTVNSQGALPGMVWQNRDVYLQGPIWAKIPHTDGNFHPSPLMGGFGLKHPPPQILVKNTPVPADPPTTFSQAKLASFITQYSTGQVSVEIEWELQKENSKRWNPEIQYTSNYYKSTNVDFAVNTEGTYSEPRPIGTRYLTRNL

SEQ ID NO: 2462 - DNA, 3122 bp, Artificial Sequence
  Synthetic polynucleotide
gaattcgccctttctacggctgcgtcaactggaccaatgagaactttcccttcaacgattgcgtcgacaagatggtgatctggtgggaggagggcaagatgacggccaaggtcgtggagtccgccaaggccattctcggcggcagcaaggtgcgtgtggaccaaaagtgcaagtcttccgcccagatcgatcccacccccgtgatcgtcacctccaacaccaacatgtgcgccgtgattgacgggaacagcgccaccttcgagcaccagcagccgttgcaggaccggatgttcaaatttgaactcacccgccgtctggagcatgactttggcaaggtgacgaagcaggaagtcaaagagttcttccgctgggcgcaggatcacgtgaccgaggtggcgcatgagttccacgtcagaaagggtggagccaacaagagacccgcccccgatgacgcggatataagcgagcccaagcgggcctgcccctcagtcgcggatccatcgacgtcagacgcggaaggagctccggtggactttgccgacaggtaccaaaacaaatgttctcgtcacgcgggcatgcttcagatgctgtttccctgcaagacatgcgagagaatgaatcagaatttcaacatttgcttcacgcacgggaccagagactgttcagaatgtttccccggcgtgtcagaatctcaaccggtcgtcagaaagaggacgtatcggaaactctgtgcgattcatcatctgctggggcgggctcccgagattgcttgctcggcctgcgatctggtcaacgtggacctggatgactgtgtttctgagcaataaatgacttaaaccaggtatggctgccgatggttatcttccagattggctcgaggacaacctctctgagggcattcgcgagtggtgggacttgaaacctggagccccgaaacccaaagccaaccagcaaaagcaggacgacggccggggtctggtgcttcctggctacaagtacctcggacccttcaacggactcgacaagggggagcccgtcaacgcggcggacgcagcggccctcgagcacgacaaagcctacgaccagcagctcaaagcgggtgacaatccgtacctgcggtataatcacgccgacgccgagtttcaggagcgtctgcaagaagatacgtcttttgggggcaacctcgggcgagcagtcttccaggccaagaagcgggttctcgaacctctcggtctggttgaggaaggcgctaagacggctcctggaaagaagagactggtagagcagtcgccacaagagccagactcctcctcgggcatcggcaagacaggccagcagcccgctaaaaagagactcaattttggtcagactggcgactcagagtcagtccccgacccacaacctctcggagaacctccagcagccccctcaggtctgggacctaatacaatggcttcaggcggtggcgctccaatggcagacaataacgaaggcgccgacggagtgggtaattcctcgggaaattggcattgcgattccacatggctgggggacagagtcatcaccaccagcacccgaacctgggccctgcccacctacaacaaccacctctacaagcaaatctccaacggcacctcgggaggaagcaccaacgacaacacctattttggctacagcaccccctgggggtattttgacttcaacagattccactgtcacttttcaccacgtgactggcaacgactcatcaacaacaattggggattccggcccaaaagactcaacttcaagctgttcaacatccaggtcaaggaagtcacgacgaacgaaggcaccaagaccatcgccaataatctcaccagcaccgtgcaggtctttacggactcggagtaccagttaccgtacgtgctaggatccgctcaccagggatgtctgcctccgttcccggcggacgtcttcacggttcctcagtacggctatttaactttaaacaatggaagccaagccctgggacgttcctccttctactgtctggagtatttcccatcgcagatgctgagaaccggcaacaactttcagttcagctacaccttcgaggacgtgcctttccacagcagctacgcgcacagccagagcctggacaggctgatgaatcccctcatcgaccagtacctgtactacctggtcagaacgcaaacgactggaactggagggacgcagactctggcattcagccaagcgggtcctagctcaatggccaaccaggctagaaattgggtgcccggaccttgctaccggcagcagcgcgtctccacgacaaccaaccagaacaacaacagcaactttgcctggacgggagctgccaagtttaagctgaacggccgagactctctaatgaatccgggcgtggcaatggcttcccacaaggatgacgacgaccgcttcttcccttcgagcggggtcctgatttttggcaagcaaggagccgggaacgatggagtggattacagccaagtgctgattacagatgaggaagaaatcaaggctaccaaccccgtggccacagaagaatatggagcagtggccatcaacaaccaggccgccaatacgcaggcgcagaccggactcgtgcacaaccagggggtgattcccggcatggtgtggcagaatagagacgtgtacctgcagggtcccatctgggccaaaattcctcacacggacggcaactttcacccgtctcccctgatgggcggctttggactgaagcacccgcctcctcaaattctcatcaagaacacaccggttccagcggacccgccgcttaccttcaaccaggccaagctgaactctttcatcacgcagtacagcaccggacaggtcagcgtggaaatcgagtgggagctgcagaaagaaaacagcaaacgctggaatccagagattcaatacacttccaactactacaaatctacaaatgtggactttgctgtcaacacggaaggagtttatagcgagcctcgccccattggcacccgttacctcacccgcaacctgtaattacatgttaatcaataaaccggttaattcgtttcagttgaactttggtctctgcgaagggcgaattc

SEQ ID NO: 2463 - protein, 736 aa, Artificial Sequence
  Synthetic polypeptide
MAADGYLPDWLEDNLSEGIREWWDLKPGAPKPKANQQKQDDGRGLVLPGYKYLGPFNGLDKGEPVNAADAAALEHDKAYDQQLKAGDNPYLRYNHADAEFQERLQEDTSFGGNLGRAVFQAKKRVLEPLGLVEEGAKTAPGKKRLVEQSPQEPDSSSGIGKTGQQPAKKRLNFGQTGDSESVPDPQPLGEPPAAPSGLGPNTMASGGGAPMADNNEGADGVGNSSGNWHCDSTWLGDRVITTSTRTWALPTYNNHLYKQISNGTSGGSTNDNTYFGYSTPWGYFDFNRFHCHFSPRDWQRLINNNWGFRPKRLNFKLFNIQVKEVTTNEGTKTIANNLTSTVQVFTDSEYQLPYVLGSAHQGCLPPFPADVFTVPQYGYLTLNNGSQALGRSSFYCLEYFPSQMLRTGNNFQFSYTFEDVPFHSSYAHSQSLDRLMNPLIDQYLYYLVRTQTTGTGGTQTLAFSQAGPSSMANQARNWVPGPCYRQQRVSTTTNQNNNSNFAWTGAAKFKLNGRDSLMNPGVAMASHKDDDDRFFPSSGVLIFGKQGAGNDGVDYSQVLITDEEEIKATNPVATEEYGAVAINNQAANTQAQTGLVHNQGVIPGMVWQNRDVYLQGPIWAKIPHTDGNFHPSPLMGGFGLKHPPPQILIKNTPVPADPPLTFNQAKLNSFITQYSTGQVSVEIEWELQKENSKRWNPEIQYTSNYYKSTNVDFAVNTEGVYSEPRPIGTRYLTRNL

SEQ ID NO: 2464 - DNA, 3117 bp, Artificial Sequence
  Synthetic polynucleotide
gaattcgcccttggctgcgtcaactggaccaatgagaactttcccttcaacgattgcgtcgacaagatggtgatctggtgggaggagggcaagatgacggccaaggtcgtggagtccgccaaggccattctcggcggcagcaaggtgcgtgtggaccaaaagtgcaagtcttccgcccagatcgatcccacccccgtgatcgtcacctccaacaccaacatgtgcgccgtgattgacgggaacagcaccaccttcgagcaccagcagccgttgcaggaccggatgttcaaatttgaactcacccgccgtctggagcatgactttggcaaggtgacgaagcaggaagtcaaagagttcttccgctgggcgcaggatcacgtgaccgaggtggcgcatgagttccacgtcagaaagggtggagccaacaagagacccgcccccgatgacgcggatataagcgagcccaagcgggcctgcccctcagtcgcggatccatcgacgtcagacgcggaaggagctccggtggactttgccgacaggtaccaaaacaaatgttctcgtcacgcgggcatgcttcagatgctgtttccctgcaagacatgcgagagaatgaatcagaatttcaacatttgcttcacgcacgggaccagagactgttcagaatgtttccccggcgtgtcagaatctcaaccggtcgtcagaaagaggacgtatcggaaactctgtgcgattcatcatctgctggggcgggctcccgagattgcttgctcggcctgcgatctggtcaacgtggacctggatgactgtgtttctgagcaataaatgacttaaaccaggtatggctgccgatggttatcttccagattggctcgaggacaacctctctgagggcattcgcgagtggtgggacttgaaacctggagccccgaaacccaaagccaaccagcaaaagcaggacgacggccggggtctggtgcttcctggctacaagtacctcggacccttcaacggactcgacaagggggagcccgtcaacgcggcggacgcagcggccctcgagcacgacaaagcctacgaccagcagctcaaagcgggtgacaatccgtacctgcggtataatcacgccgacgccgagtttcaggagcgtctgcaagaagatacgtcttttgggggcaacctcgggcgagcagtcttccaggccaagaagcgggttctcgaacctctcggtctggttgaggaaggcgctaagacggctcctggaaagaagagaccggtagagcagtcgccacaagagccagactcctcctcgggcatcggcaagacaggccagcagcccgctaaaaagagactcaattttggtcagactggcgactcagagtcagtccccgacccacaacctctcggagaacctccagcagccccctcaggtctgggacctaatacaatggcttcaggcggtggcgctccaatggcagacaataacgaaggcgccgacggagtgggtaattcctcgggaaattggcattgcgattccacatggctgggggacagagtcatcaccaccagcacccgaacctgggccctgcccacctacaacaaccacctctacaagcaaatctccaacggcacctcgggaggaagcaccaacgacaacacctattttggctacagcaccccctgggggtattttgacttcaacagattccactgtcacttttcaccacgtgactggcaacgactcatcaacaacaattggggattccggcccaaaagactcaacttcaagctgttcaacatccaggtcaaggaagtcacgacgaacgaaggcaccaagaccatcgccaataatctcaccagcaccgtgcgggtctttacggactcggagtaccagttaccgtacgtgctaggatccgctcaccagggatgtctgcctccgttcccggcggacgtcttcatggttcctcagtacggctatttaactttaaacaatggaagccaagccctgggacgttcctccttctactgtctggagtatttcccatcgcagatgctgagaaccggcaacaactttcagttcagctacaccttcgaggacgtgcctttccacagcagctacgcgcacagccagagcctggacaggctgatgaatcccctcatcgaccagtacctgtactacctggtcagaacgcaaacgactggaactggagggacgcagactctggcattcagccaagcgggtcctagctcaatggccaaccaggctagaaattgggtgcccggaccttgctaccggcagcagcgcgtctccacgacaaccaaccagagcaacaacagcaactttgcctggacgggagctgccaagtttaagctgaacggccgagactctctaatgaatccgggcgtggcaatggcttcccacaaggatgacgacgaccgcttcttcccttcgagcggggtcctgatttttggcaagcaaggagccgggaacgatggagtggattacagccaagtgctgattacagatgaggaagaaatcaaggctaccaaccccgtggccacagaagaatatggagcagtggccatcaacaaccaggccgccaatacgcaggcgcagaccggactcgtgcacaaccagggggtgattcccggcatggtgtggcagaatagagacgtgtacctgcagggtcccatctgggccaaaattcctcacacggacggcaactttcacccgtctcccctgatgggcggctttggactgaagcacccgcctcctcaaattctcatcaagaacacaccggttccagcggacccgccgcttaccttcaaccaggccaagctgaactctttcatcacgcagtacagcaccggacaggtcagcgtggaaatcgagtgggagctgcagaaagaaaacagcaaacgctggaatccagagattcaatacacttccaactactacaaatctacaaatgtggactttgctgtcaacacggaaggagtttatagcgagcctcgccccattggcacccgttacctcacccgcaacctgtaattacatgttaatcaataaaccggttaattcgtttcagttgaactttggtctctgcgaagggcgaattc

SEQ ID NO: 2465 - protein, 736 aa, Artificial Sequence
  Synthetic polypeptide
MAADGYLPDWLEDNLSEGIREWWDLKPGAPKPKANQQKQDDGRGLVLPGYKYLGPFNGLDKGEPVNAADAAALEHDKAYDQQLKAGDNPYLRYNHADAEFQERLQEDTSFGGNLGRAVFQAKKRVLEPLGLVEEGAKTAPGKKRPVEQSPQEPDSSSGIGKTGQQPAKKRLNFGQTGDSESVPDPQPLGEPPAAPSGLGPNTMASGGGAPMADNNEGADGVGNSSGNWHCDSTWLGDRVITTSTRTWALPTYNNHLYKQISNGTSGGSTNDNTYFGYSTPWGYFDFNRFHCHFSPRDWQRLINNNWGFRPKRLNFKLFNIQVKEVTTNEGTKTIANNLTSTVRVFTDSEYQLPYVLGSAHQGCLPPFPADVFMVPQYGYLTLNNGSQALGRSSFYCLEYFPSQMLRTGNNFQFSYTFEDVPFHSSYAHSQSLDRLMNPLIDQYLYYLVRTQTTGTGGTQTLAFSQAGPSSMANQARNWVPGPCYRQQRVSTTTNQSNNSNFAWTGAAKFKLNGRDSLMNPGVAMASHKDDDDRFFPSSGVLIFGKQGAGNDGVDYSQVLITDEEEIKATNPVATEEYGAVAINNQAANTQAQTGLVHNQGVIPGMVWQNRDVYLQGPIWAKIPHTDGNFHPSPLMGGFGLKHPPPQILIKNTPVPADPPLTFNQAKLNSFITQYSTGQVSVEIEWELQKENSKRWNPEIQYTSNYYKSTNVDFAVNTEGVYSEPRPIGTRYLTRNL

SEQ ID NO: 2466 - DNA, 3121 bp, Artificial Sequence
  Synthetic polynucleotide
gaattcgcccttctacggctgcgtcaactggaccaatgagaactttcccttcaacgattgcgtcgacaagatggtgatctggtgggaggagggcaagatgacggccaaggtcgtggagtccgccaaggccattctcggcggcagcaaggtgcgtgtggaccaaaagtgcaagtcttccgcccagatcgatcccacccccgtgatcgtcacctccaacaccaacatgtgcgccgtgattgacgggaacagcaccaccttcgagcaccagcagccgttgcaggaccggatgttcaaatttgaactcacccgccgtctggagcatgactttggcaaggtgacgaagcaggaagtcaaagagttcttccgctgggcgcaggatcacgtgaccgaggtggcgcatgagttccacgtcagaaagggtggcgccaacaagagacccgcccccgatgacgcggatataagcgagcccaagcgggcctgcccctcagtcgcggatccatcgacgtcagacgcggaaggagctccggtggactttgccgacaggtaccaaaacaaatgttctcgtcacgcgggcatgcttcagatgctgtttccctgcaagacatgcgagagaatgaatcagaatttcaacatttgcttcacgcacgggaccagagactgttcagaatgtttccccggcgtgtcagaatctcaaccggtcgtcagaaagaggacgtatcggaaactctgtgcgattcatcatctgctggggcgggctcccgagattgcttgctcggcctgcgatctggtcaacgtggacctggatgactgtgtttctgagcaataaatgacttaaaccaggtatggctgccgatggttatcttccagattggctcgaggacaacctctctgagggcattcgcgagtggtgggacttgaaacctggagccccgaaacccaaagccaaccagcaaaagcaggacgacggccggggtctggtgcttcctggctacaagtacctcggacccttcaacggactcgacaagggggagcccgtcaacgcggcggacgcagcggccctcgagcacgacaaagcctacgaccagcagctcaaagcgggtgacaatccgtacctgcggtataatcacgccgacgccgagtttcaggagcgtctgcaagaagatacgtcctttgggggcaacctcgggcgagcagtcttccaggccaagaagcgggttctcgaacctctcggtctggttgaggaaggcgctaagacggctcctggaaagaagagaccggtagagcagtcgccacaagagccagactcctcctcgggcatcggcaagacaggccagcagcccgctaaaaagagactcaattttggtcagactggcgactcagagtcagtccccgacccacaacctctcggagaacctccagcagccccctcaggtctgggacctaatacaatggcttcaggcggtggcgctccaatggcagacaataacgaaggcgccgacggagtgggtaattcctcgggaaattggcattgcgattccacatggctgggggacagagtcatcaccaccagcacccgaacctgggccctgcccacctacaacaaccacctctacaagcaaatctccaacggcacctcgggaggaagcaccaacgacaacacctattttggctacagcaccccctgggggtattttgacttcaacagattccactgtcacttttcaccacgtgactggcaacgactcatcaacaacaattggggattccggcccaaaagactcaacttcaagctgttcaacatccaggtcaaggaagtcacgacgaacgaaggcaccaagaccatcgccaataatctcaccagcaccgtgcaggtctttacggacttggagtaccagttaccgtacgtgctaggatccgctcaccagggatgtctgcctccgttcccggcggacgtcttcatggttcctcagtacggctatttaactttaaacaatggaagccaagccctgggacgttcctccttctactgtctggagtatttcccatcgcagatgccgagaaccggcaacaactttcagttcagctacaccttcgaggacgtgcctttccacagcagctacgcgcacagccagagcctggacaggctgatgaatcccctcatcgaccagtacctgtactacctggtcagaacgcaaacgactggaactggagggacgcagactctggcattcagccaagcgggtcctagctcaatggccaaccaggctagaaattgggtgcccggaccttgctaccggcagcagcgcgtctccacgacaaccaaccagaacaacaacagcaactttgcctggacgggagctgccaagtttaagctgaacggccgagactctctaatgaatccgggcgtggcaatggcttcccacaaggatgacgacgaccgcttcttcccttcgagcggggtcctgatttttggcaagcaaggagccgggaacgatggagtggattacagccaagtgctgattacagatgaggaagaaatcaaggctaccaaccccgtggccacagaagaatatggagcagtggccatcaacaaccaggccgccaatacgcaggcgcagaccggactcgtgcacaaccagggggtgattcccggcatggtgtggcagaatagagacgtgtacctgcagggtcccatctgggccaaaattcctcacacggacggcaactttcacccgtctcccctgatgggcggctttggactgaagcacccgcctcctcaaattctcatcaagaacacaccggttccagcggacccgccgcttaccttcaaccaggccaagctgaactctttcatcacgcagtacagcaccggacaggtcagcgtggaaatcgagtgggagctgcagaaagaaaacagcaaacgctggaatccagagattcaatacacttccaactactacaaatctacaaatgtggactttgctgtcaacacggaaggagtttatagcgagcctcgccccattggcacccgttacctcacccgcaacctgtaattacatgttaatcaataaaccggttaattcgtttcagttgaactttggtctctgcgaagggcgaattc

SEQ ID NO: 2467 - protein, 736 aa, Artificial Sequence
  Synthetic polypeptide
MAADGYLPDWLEDNLSEGIREWWDLKPGAPKPKANQQKQDDGRGLVLPGYKYLGPFNGLDKGEPVNAADAAALEHDKAYDQQLKAGDNPYLRYNHADAEFQERLQEDTSFGGNLGRAVFQAKKRVLEPLGLVEEGAKTAPGKKRPVEQSPQEPDSSSGIGKTGQQPAKKRLNFGQTGDSESVPDPQPLGEPPAAPSGLGPNTMASGGGAPMADNNEGADGVGNSSGNWHCDSTWLGDRVITTSTRTWALPTYNNHLYKQISNGTSGGSTNDNTYFGYSTPWGYFDFNRFHCHFSPRDWQRLINNNWGFRPKRLNFKLFNIQVKEVTTNEGTKTIANNLTSTVQVFTDLEYQLPYVLGSAHQGCLPPFPADVFMVPQYGYLTLNNGSQALGRSSFYCLEYFPSQMPRTGNNFQFSYTFEDVPFHSSYAHSQSLDRLMNPLIDQYLYYLVRTQTTGTGGTQTLAFSQAGPSSMANQARNWVPGPCYRQQRVSTTTNQNNNSNFAWTGAAKFKLNGRDSLMNPGVAMASHKDDDDRFFPSSGVLIFGKQGAGNDGVDYSQVLITDEEEIKATNPVATEEYGAVAINNQAANTQAQTGLVHNQGVIPGMVWQNRDVYLQGPIWAKIPHTDGNFHPSPLMGGFGLKHPPPQILIKNTPVPADPPLTFNQAKLNSFITQYSTGQVSVEIEWELQKENSKRWNPEIQYTSNYYKSTNVDFAVNTEGVYSEPRPIGTRYLTRNL

SEQ ID NO: 2468 - DNA, 3122 bp, Artificial Sequence
  Synthetic polynucleotide
gaattcgccctttctacggctgcgtcaactggaccaatgagaactttcccttcaacgattgcgtcgacaagatggtgatctggtgggaggagggcaagatgacggccaaggtcgtggagtccgccaaggccattctcggcggcagcaaggtgcgtgtggaccaaaagtgcaagtcttccgcccagatcgatcccacccccgtgatcgtcacctccaacaccaacatgtgcgccgtgattgacgggaacagcaccaccttcgagcaccagcagccgttgcaggaccggatgttcaaatttgaactcacccgccgtctggagcatgactttggcaaggtgacgaagcaggaagtcaaagggttcttccgctgggcgcaggatcacgtgaccgaggtggcgcatgagttccacgtgcgagcccaagcgggcctgcccctcagtcgcggatccatcgacgtcagaccagaaagggtggagccaacaagagacccgcccccgatgacgcggatataagcggaaggagctccggtggactttgccgacaggtaccaaaacaaatgttctcgtcacgcgggcatgcttcagatgctgtttccctgcaagacatgcgagagaatgaatcagaatttcaacatttgcttcacgcacgggaccagagactgttcagaatgtttccccggcgtgtcagaatctcaaccggtcgtcagaaagaggacgtatcggaaactctgtgcgattcatcatctgctggggcgggctcccgagattgcttgctcggcctgcgatctggtcaacgtggacctggatgactgtgtttctgagcaataaatgacttaaaccaggtatggctgccgatggttatcttccagattggctcgaggacaacctctctgagggcattcgcgagtggtgggacttgaaacctggagccccgaaacccaaagccaaccagcaaaagcaggacgacggccggggtctggtgcttcctggctacaagtacctcggacccttcaacggactcgacaagggggagcccgtcaacgcggcggacgcagcggccctcgagcacgacaaagcctacgaccagcagctcaaagcgggtgacaatccgtacctgcggtataatcacgccgacgccgagtttcaggagcgtctgcaagaagatacgtcttttgggggcaacctcgggcgagcagtcttccaggccaagaagcgggttctcgaacctctcggtctggttgaggaaggcgctaagacggctcctggaaagaagagaccggtagagcagtcgccacaagagccagactcctcctcgggcatcggcaagacaggccagcagcccgctaaaaagagactcaattttggtcagactggcgactcagagtcagtccccgacccacaacctctcggagaacctccagcagccccctcaggtctgggacctaatacaatggcttcaggcggtggcgctccaatggcagacaataacgaaggcgccgacggagtgggtaattcctcgggaaattggcattgcgattccacatggctgggggacagagtcatcaccaccagcacccgaacctgggccctgcccacctacaacaaccacctctacaagcaaatctccaacggcacctcgggaggaagcaccaacgacaacacctattttggctacagcaccccctgggggtattttgacttcaacagattccactgtcacttttcaccacgtgactggcaacgactcatcaacaacaattggggattccggcccaaaagactcaacttcaagctgttcaacatccaggtcaaggaagtcacgacgaacgaaggcaccaagaccatcgccaataatctcaccagcaccgtgcaggtctttacggactcggagtaccagttaccgtacgtgctaggatccgctcaccagggatgtctgcctccgttcccggcggacgtcttcatggttcctcagtacggctatttaactttaaacaatggaagccaagccctgggacgttcctccttctactgtctggagtatttcccatcgcagatgctgagaaccggcaacaactttcagttcagctacaccttcgaggacgtgcctttccacagcagctacgcgcacagccagagcctggacaggctgatgaatcccctcatcgaccagtacctgtactacctggtcagaacgcaaacgactggaactggagggacgcagactctggcattcagccaagcgggtcctagctcaatggccaaccaggctagaaattgggtgcccggaccttgctaccggcagcagcgcgtctccacgacaaccaaccagaacaacaacagcaactttgcctggacgggagctgccaagtttaagctgaacggccgagactctctaatgaatccgggcgtggcaatggcttcccacaaggatgacgacgaccgcttcttcccttcgagcggggtcctgatttttggcaagcaaggagccgggaacgatggagtggattacagccaagtgctgattacagatgaggaagaaatcaaggctaccaaccccgtggccacagaagaatatggagcagtggccatcaacaaccaggccgccaatacgcaggcgcagaccggactcgtgcacaaccagggggtgattcccggcatggtgtggcagaatagagacgtgtacctgcagggtcccatctgggccaaaattcctcacacggacggcaactttcacccgtctcccctgatgggcggctttggactgaagcacccgcctcctcaaattctcatcaagaacacaccggttccagcggacccgccgcttaccttcaaccaggccaagctgaactctttcatcacgcagtacagcaccggacaggtcagcgtggaaatcgagtgggagctgcagaaagaaaacagcaaacgctggaatccagagattcaatacacttccaactactacaaatctacaaatgtggactttgctgtcaacacggagggggtttatagcgagcctcgccccattggcacccgttacctcacccgcaacctgtaattacatgttaatcaataaaccggttaattcgtttcagttgaactttggtctctgcgaagggcgaattc

SEQ ID NO: 2469 - protein, 736 aa, Artificial Sequence
  Synthetic polypeptide
MAADGYLPDWLEDNLSEGIREWWDLKPGAPKPKANQQKQDDGRGLVLPGYKYLGPFNGLDKGEPVNAADAAALEHDKAYDQQLKAGDNPYLRYNHADAEFQERLQEDTSFGGNLGRAVFQAKKRVLEPLGLVEEGAKTAPGKKRPVEQSPQEPDSSSGIGKTGQQPAKKRLNFGQTGDSESVPDPQPLGEPPAAPSGLGPNTMASGGGAPMADNNEGADGVGNSSGNWHCDSTWLGDRVITTSTRTWALPTYNNHLYKQISNGTSGGSTNDNTYFGYSTPWGYFDFNRFHCHFSPRDWQRLINNNWGFRPKRLNFKLFNIQVKEVTTNEGTKTIANNLTSTVQVFTDSEYQLPYVLGSAHQGCLPPFPADVFMVPQYGYLTLNNGSQALGRSSFYCLEYFPSQMLRTGNNFQFSYTFEDVPFHSSYAHSQSLDRLMNPLIDQYLYYLVRTQTTGTGGTQTLAFSQAGPSSMANQARNWVPGPCYRQQRVSTTTNQNNNSNFAWTGAAKFKLNGRDSLMNPGVAMASHKDDDDRFFPSSGVLIFGKQGAGNDGVDYSQVLITDEEEIKATNPVATEEYGAVAINNQAANTQAQTGLVHNQGVIPGMVWQNRDVYLQGPIWAKIPHTDGNFHPSPLMGGFGLKHPPPQILIKNTPVPADPPLTFNQAKLNSFITQYSTGQVSVEIEWELQKENSKRWNPEIQYTSNYYKSTNVDFAVNTEGVYSEPRPIGTRYLTRNL

SEQ ID NO: 2470 - DNA, 2370 bp, Artificial Sequence
  Synthetic polynucleotide
gaattcgccctttctacggctgcgtcaactggaccaatgagaactttcccttcaacgattgcgtcgacaagatggtgatctggtgggaggagggcaagatgacggccaaggtcgtggagtccgccaaggccattctcggcggcagcaaggtgcgcgtggaccaaaagtgcaagtcgtccgcccagatcgaccccacccccgtgatcgtcacctccaacaccaacatgtgcgccgtgattgacgggaacagcaccaccttcgagcaccagcagccgttgcaggaccggatgttcaagttcgaactcacccgccgtctggagcacgactttggcaaggtgaccaagcaggaagtcaaagagttcttccgctgggcgcaggatcacgtgaccgaggtggcgcatgagttctacgtcagaaagggcggagccagcaaaagacccgcccccgatgacgcggatataagcgagcccaagcgggcctgcccctcagtcgcggatccatcgacgtcagacgcggaaggagctccggtggactttgccgacaggtaccaaaacaaatgttctcgtcacgcgggcatgcttcagacgctgtttccctgcaaaacgtgcgagagaatgaatcagaatttcaacatttgcttcacgcacggggtcagagactgctcagaatgtttccccggtgcatcagaatctcaaccggtcgtcagaaaaaaaacgtatcagaaactgtgtgccattcatcatctgctggggcgggcacccgagattgcttgctcggcctgcgatctggtcaacgtggacctggacgactgtgtttctgagcaataaatgacttaaaccaggtatggctgccgatggttatcttccagattggcttgaggacaacctctctgagggcattcgcgagtggtgggacctgaaacctggagccccgaaacccaaagccaaccagcaaaagcaggacgacggccggggtctggtgcttcctggctacaagtacctcggacccttcaacggactcgacaagggggagcccgtcaacgcggcggacgcagcggccctcgagcacgacaaggcctacgaccagcagctcaaagcgggtgacaatccgtacctgcggtataaccacgccgacgccgagtttcaggagcgtctgcaagaagatacgtcttttgggggcaacctcgggcgagcagtcttccaggccaagaagcgggttctcgaacctctcggtctggttgaggaaggcgctaagacggctcctggaaagaagagaccggtagagccatcacctcagcgttcccccgactcctccacgggcatcggcaagaaaggccaccagcccgcgagaaagagactgaactttgggcagactggcgactcggagtcagtccccgaccctcaaccaatcggagaaccaccagcaggcccctctggtctgggatctggtacaatggctgcaggcggtggcgctccaatggcagacaataacgaaggcgccgacggagtgggtagttcctcaggaaattggcattgcgattccacatggctgggcgacagagtcatcaccaccagcacccgaacctgggccctgcccacctacaacaaccatctctacaagcaaatctccaacgggacatcgggaggaagcactaacgacaacacctactttggctacagcaccccctgggggtattttgacttcaacagattccactgccacttctcaccacgtgactggcagcgactcatcaacaataactggggattccggcccaagagactcaacttcaagctcttcaacatccaggtcaaggaggtcacgcagaatgaaggcaccaagaccatcgccaataaccttaccagcacgattcaggtgtttacggactcggaataccagctcccgtacgtcctcggctctgcgcaccagggctgcctccctccgttcccggcggacgtcttcatgattcctcagtacgggtatctgaccctaaacaatggcagtcaggctgtgggccgttcctccttctactgcctggaatacttcccttctcaaatgctgaggacgggcaacaactttgaattcagctacaccttcgaggacgtgcctttccacagcagctacgcgcacagccagagcctggaccggctgatgaaccctctcatcgaccagtacctgtattacttatccagaactcagtccacaggaggaactcaaggtactcagcaattgttattttctcaagccgggcccgcaaacatgtyggctcaggccaagaactggctacctggaccgtgttaccgtcagcaacgagtttccacgacactgtcgcaaaacaacaacagcaattttgctggaccggtgccacca

SEQ ID NO: 2471 - protein, 738 aa, Artificial Sequence; identical to SEQ ID NO: 2461
  Synthetic polypeptide

SEQ ID NO: 2472 - DNA, 2205 bp, Artificial Sequence
  Synthetic polynucleotide
atgactgacggttaccttccagattggctagaggacaacctctctgaaggcgttcgagagtggtgggcgctgcaacctggagcccctaaacccaaggcaaatcaacaacatcaggacaacgctcggggtcttgtgcttccgggttacaaatacctcggacccggcaacggactcgacaagggggaacccgtcaacgcagcggacgcggcagccctcgagcacgacaaggcctacgaccagcagctcaaggccggtgacaacccctacctcaagtacaaccacgccgacgcggagttccagcagcggcttcagggcgacacatcgtttgggggcaacctcggcagagcagtcttccaggccaaaaagagggttcttgaacctcttggtctggttgagcaagcgggtgagacggctcctggaaagaagagaccgttgattgaatccccccagcagcccgactcctccacgggtatcggcaaaaaaggcaagcagccggctaaaaagaagctcgttttcgaagacgaaactggagcaggcgacggaccccctgagggatcaacttccggagccatgtctgatgacagtgagatgcgtgcagcagctggcggagctgcagtcgagggcggacaaggtgccgatggagtgggtaatgcctcgggtgattggcattgcgattccacctggtctgagggccacgtcacgaccaccagcaccagaacctgggtcttgcccacctacaacaaccacctctacaagcgactcggagagagcctgcagtccaacacctacaacggattctccaccccctggggatactttgacttcaaccgcttccactgccacttctcaccacgtgactggcagcgactcatcaacaacaactggggcatgcgacccaaagccatgcgggtcaaaatcttcaacatccaggtcaaggaggtcacgacgtcgaacggcgagacaacggtggctaataaccttaccagcacggttcagatctttgcggactcgtcgtacgaactgccgtacgtgatggatgcgggtcaagagggcagcctgcctccttttcccaacgacgtctttatggtgccccagtacggctactgtggactggtgaccggcaacacttcgcagcaacagactgacagaaatgccttctactgcctggagtactttccttcgcagatgctgcggactggcaacaactttgaaattacgtacagttttgagaaggtgcctttccactcgatgtacgcgcacagccagagcctggaccggctgatgaaccctctcatcgaccagtacctgtggggactgcaatcgaccaccaccggaaccaccctgaatgccgggactgccaccaccaactttaccaagctgcggcctaccaacttttccaactttaaaaagaactggctgcccgggccttcaatcaagcagcagggcttctcaaagactgccaatcaaaactacaagatccctgccaccgggtcagacagtctcatcaaatacgagacgcacagcactctggacggaagatggagtgccctgacccccggacctccaatggccacggctggacctgcggacagcaagttcagcaacagccagctcatctttgcggggcctaaacagaacggcaacacggccaccgtacccgggactctgatcttcacctctgaggaggagctggcagccaccaacgccaccgatacggacatgtggggcaacctacctggcggtgaccagagcaacagcaacctgccgaccgtggacagactgacagccttgggagccgtgcctggaatggtctggcaaaacagagacatttactaccagggtcccatttgggccaagattcctcataccgatggacactttcacccctcaccgctgattggtgggtttgggctgaaacacccgcctcctcaaatttttatcaagaacaccccggtacctgcgaatcctgcaacgaccttcagctctactccggtaaactccttcattactcagtacagcactggccaggtgtcggtgcagattgactgggagatccagaaggagcggtccaaacgctggaaccccgaggtccagtttacctccaactacggacagcaaaactctctgttgtgggctcccgatgcggctgggaaatacactgagcctagggctatcggtacccgctacctcacccaccacctgtaa

SEQ ID NO: 2473 - protein, 734 aa, Artificial Sequence; identical to SEQ ID NO: 2445
  Synthetic polypeptide

SEQ ID NO: 2474 - DNA, 3128 bp, Artificial Sequence
  Synthetic polynucleotide
gaattcgccctttctacggctgcgtcaactggaccaatgagaactttcccttcaacgattgcgtcgacaagatgttgatctggtgggaggagggcaagatgacggccaaggtcgtggagtccgccaaggccattctcggcggcagcaaagtgcgcgtggaccaaaagtgcaagccgtccgcccagatcgaccccacccccgtgatcgtcacctccaacaccaacatgtgcgccgtgattgacgggaacagcaccaccttcgagcaccagcagccgttgcgggaccggatgttcaagtttgaactcacccgccgtctggagcacgactttggcaaggtgacaaagcaggaagtcagagagttcttccgctgggcgcaggatcacgtgaccgaggtggcgcacgagttctacgtcagaaagggtggagccaacaagagacccgcccccgatgacgcggataaaagcgagcccaagcgggcctgcccctcagtcgcggatccatcgacgtcagacgcggaaggagctccggtggactttgccgacaggtaccaaaacaaatgttctcgtcacgcgggcatgcttcagatgctgtttccctgcaaaacatgcgagagaatgaatcagaatttcaacatttgcttcacgcacgggaccagagactgttcagaatgtttccccggcgtgtcagaatctcaaccggtcgtcagaaaaaagacgtatcggaaactctgtgcgattcatcatctgctggggcgggcacccgagattgcttgctcggcctgcgatctggtcaacgtggacctagatgactgtgtttctgagcaataaatgacttaaaccaggtatggctgccgatggttatcttccagattggctcgaggacaacctctctgagggcattcgcgagtggtgggacttgaaacctggagccccgaaacccaaagccaaccagcaaaagcaggacgacggccggggtctggtgcttcctggctacaagtacctcggacccttcaacggactcgacaagggggagcccgtcaacgcggcggacgcagcggccctcgagcacgacaaggcctacgaccagcagctcaaagcgggtgacaatccgtacctgcggtataaccacgccgacgccgagtttcaggagcgtctgcaagaagatacgtcttttgggggcaacctcgggcgagcagtcttccaggccaagaagcgggttctcgaacctctcggtctggttgaggaaggcgctaagacggctcctggaaagaagagaccggtagagccatcaccccagcgttctccagactcctctacgggcatcggcaagaaaggccagcagcccgcgaaaaagagactcaactttgggcagactggcgactcagagtcagtgcccgaccctcaaccaatcggagaaccccccgcaggcccctctggtctgggatctggtacaatggctgcaggcggtggcgctccaatggcagacaataacgaaggcgccgacggagtgggtagttcctcaggaaattggcattgcgattccacatggctgggcgacagagtcatcaccaccagcacccgaacctgggccctccccacctacaacaaccacctctacaagcaaatctccaacgggacttcgggaggaagcaccaacgacaacacctacttcggctacagcaccccctgggggtattttgactttaacagattccactgccacttctcaccacgtgactggcagcgactcatcaacaacaactggggattccggcccaagagactcaacttcaagctcttcaacatccaggtcaaggaggtcacgcagaatgaaggcaccaagaccatcgccaataaccttaccagcacgattcaggtctttacggactcggaataccagctcccgtacgtcctcggctctgcgcaccagggctgcctgcctccgttcccggcggacgtcttcatgattcctcagtacgggtacctgactctgaacaatggcagtcaggccgtgggccgttcctccttctactgcctggagtactttccttctcaaatgctgagaacgggcaacaactttgagttcagctaccagtttgaggacgtgccttttcacagcagctacgcgcacagccaaagcctggaccggctgatgaaccccctcatcgaccagtacctgtactacctgtctcggactcagtccacgggaggtaccgcaggaactcagcagttgctattttctcaggccgggcctaataacatgtcggctcaggccaaaaactggctacccgggccctgctaccggcagcaacgcgtctccacgacactgtcgcaaaataacaacagcaactgtaaatcccggtgtcgctatggcaacccacaaggacgacgaagagcgattttgcctggaccggtgccaccaagtatcatctgaatggcagagactctctgttttccgtccagcggagtcttaatgtttgggaaacagggagctggaaaagacaacgtggactatagcagcgttatgctaaccagtgaggaagaaattaaaaccaccaacccagtggccacggaacagtacggcgtggtggccgataacctgcaacagcaaaacgccgctcctattgtaggggccgtcaacagtcaaggagccttacctggcatggtctggcagaaccgggacgtgtacctgcagggtcctatctgggccaagattcctcacacggacggaaactttcatccctcgccgctgatgggaggctttggactgaaacacccgcctcctcagatcctgattaagaatacacctgttcccgcggatcctccaactaccttcagtcaagctaagctggcgtcgttcatcacgcagtacagcaccggacaggtcagcgtggaaattgaatgggagctgcagaaagaaaacagcaaacgctggaacccagagattcaatacacttccaactactacaaatctacaaatgtggacttcgctgttaacacagatggcacttattctgagcctcgccccattggcacccgttacctcacccgtaatctgtaattgctcgttaatcaataaaccggttgattcgtttcagttgaactttggtctctgcgaagggcgaattc

SEQ ID NO: 2475 - protein, 738 aa, Artificial Sequence; identical to SEQ ID NO: 2395
  Synthetic polypeptide

SEQ ID NO: 2476 - DNA, 3128 bp, Artificial Sequence
  Synthetic polynucleotide
gaattcgccctttctacggctgcgtcaactggaccaatgagaactttcccttcaacgattgcgtcgacaagatggtgatctggtgggaggagggcaagatgacggccaaggtcgtggagtccgccaaggccattctcggcggcagcaaagtgcgcgtggaccaaaagtgcaagtcgtccgcccagatcgaccccacccccgtgatcgtcacctccaacaccaacatgtgcgccgtgattgacgggaacagcaccaccttcgagcaccagcagccgttgcaggaccggatgttcaagtttgaactcacccgccgtctggagcacgactttggcaaggtgacaaagcaggaagtcagagagttcttccgctgggcgcaggatcacgtgaccgaggtggcgcacgagttctacgtcagaaagggtggagccaacaagagacccgcccccgatgacgcggataaaagcgagcccaagcgggcctgcccctcagtcgcggatccatcgacgtcagacgcggaaggagctccggtggactttgccgacaggtaccaaaacaaatgttctcgtcacgcgggcatgcttcagatgctgtttccctgcaaaacatgcgagagaatgaatcagaatttcaacatttgcttcacgcacgggaccagagactgttcagaatgtttccccggcgtgtcagaatctcaaccggttgtcagaaaaaagacgtatcggaaactctgtgcgattcatcatctgctggggcgggcacccgagattgcttgctcggcctgcgatctggtcaacgtggacctagatgactgtgtttctgagcaataaatgacttaaaccaggtatggctgccgatggttatcttccagattggctcgaggacaacctctctgagggcattcgcgagtggtgggacttgaaacctggagccccgaaacccaaagccaaccagcaaaagcaggacgacggccggggtctggtgcttcctggctacaagtacctcggacccttcaacggactcgacaagggggagcccgtcaacgcggcggacgcagcggccctcgagcacgacaaggcctacgaccagcagctcaaagcgggtgacaatccgtacctgcggtataaccacgccgacgccgagtttcaggagcgtctgcaagaagatacgtcttttgggggcaacctcgggcgagcagtcttccaggccaagaagcgggttctcgaacctctcggtctggttgaggaaggcgctaagacggctcctggaaagaagagaccggtagagccatcaccccagcgttctccagactcctctacgggcatcggcaagaaaggccagcagcccgcgaaaaagagactcaactttgggcagactggcgactcagagtcagtgcccgaccctcaaccaatcggagaaccccccgcaggcccctctggtctgggatctggtacaatggctgcaggcggtggcgctccaatggcagacaataacgaaggcgccgacggagtgggtagttcctcaggaaattggcattgcgattccacatggctgggcgacagagtcatcaccaccagcacccgaacctgggccctccccacctacaacaaccacctctacaagcaaatctccaacgggacttcgggaggaagcaccaacgacaacacctacttcggctacagcaccccctgggggtattttgactttaacagattccactgccacttctcaccacgtgactggcagcgactcatcaacaacaactggggattccggcccaagagacccaacttcaagctcttcaacatccaggtcaaggaggtcacgcagaatgaaggcaccaagaccatcgccaataaccttaccagcacgattcaggtctttacggactcggaataccagctcccgtacgtcctcggctctgcgcaccagggctgcctgcctccgttcccggcggacgtcttcatgattcctcagtacgggtacctgactctgaacaatggcagtcaggccgtgggccgttcctccttctactgcctggagtactttccttctcaaatgctgagaacgggcaacaactttgagttcagctaccagtttgaggacgtgccttttcacagcagctacgcgcacagccaaagcctggaccggctgatgaaccccctcatcgaccagtacctgtactacctgtctcggactcagtccacgggaggtaccgcaggaactcagcagttgctattttctcaggccgggcctaataacatgtcggctcaggccaaaaactggctacccgggccctgctaccggcagcaacgcgtctccacgacactgtcgcaaaataacaacagcaactttgcctggaccggtgccaccaagtatcatctgaatggcagagactctctggtaaatcccggtgtcgctatggcaacccacaaggacgacgaagagcgattttttccgtccagcggagtcttaatgtttgggaaacagggagctggaaaagacaacgtggactatagcagcgttatgctaaccagtgaggaagaaattaaaaccaccaacccagtggccacagaacagtacggcgtggtggccgataacctgcaacagcaaaacgccgctcctattgtaggggccgtcaacagtcaaggagccttacctggcatggtctggcagaaccgggacgtgtacctgcagggtcctatctgggccaagattcctcacacggacggaaactttcatccctcgccgctgatgggaggctttggactgaaacacccgcctcctcagatcctgattaagaatacacctgttcccgcggatcctccaactaccttcagtcaagctaagctggcgtcgttcatcacgcagtacagcaccggacaggtcagcgtggaaattgaatgggagctgcagaaagaaaacagcaaacgctggaacccagagattcaatacacttccaactactacaaatctacaaatgtggactttgctgttaacacagatggcacttattctgagcctcgccccattggcacccgttacctcacccgtaatctgtaattgcttgttaatcaataaaccggttgattcgtttcagttgaactttggtctctgcgaagggcgaattc

SEQ ID NO: 2477 - protein, 738 aa, Artificial Sequence
  Synthetic polypeptide
MAADGYLPDWLEDNLSEGIREWWDLKPGAPKPKANQQKQDDGRGLVLPGYKYLGPFNGLDKGEPVNAADAAALEHDKAYDQQLKAGDNPYLRYNHADAEFQERLQEDTSFGGNLGRAVFQAKKRVLEPLGLVEEGAKTAPGKKRPVEPSPQRSPDSSTGIGKKGQQPAKKRLNFGQTGDSESVPDPQPIGEPPAGPSGLGSGTMAAGGGAPMADNNEGADGVGSSSGNWHCDSTWLGDRVITTSTRTWALPTYNNHLYKQISNGTSGGSTNDNTYFGYSTPWGYFDFNRFHCHFSPRDWQRLINNNWGFRPKRPNFKLFNIQVKEVTQNEGTKTIANNLTSTIQVFTDSEYQLPYVLGSAHQGCLPPFPADVFMIPQYGYLTLNNGSQAVGRSSFYCLEYFPSQMLRTGNNFEFSYQFEDVPFHSSYAHSQSLDRLMNPLIDQYLYYLSRTQSTGGTAGTQQLLFSQAGPNNMSAQAKNWLPGPCYRQQRVSTTLSQNNNSNFAWTGATKYHLNGRDSLVNPGVAMATHKDDEERFFPSSGVLMFGKQGAGKDNVDYSSVMLTSEEEIKTTNPVATEQYGVVADNLQQQNAAPIVGAVNSQGALPGMVWQNRDVYLQGPIWAKIPHTDGNFHPSPLMGGFGLKHPPPQILIKNTPVPADPPTTFSQAKLASFITQYSTGQVSVEIEWELQKENSKRWNPEIQYTSNYYKSTNVDFAVNTDGTYSEPRPIGTRYLTRNL

SEQ ID NO: 2478 - protein, 738 aa, Artificial Sequence
  Synthetic polypeptide
MAADGYLPDWLEDNLSEGIREWWDLKPGAPKPKANQQKQDDGRGLVLPGYKYLGPFNGLDKGEPVNAADAAALEHDKAYDQQLKAGDNPYLRYNHADAEFQERLQEDTSFGGNLGRAVFQAKKRVLEPLGLVEEAAKTAPGKKRPVEPSPQRSPDSSTGIGKKGQQPAKKRLNFGQTGDSESVPDPQPIGEPPAGPSGLGSGTMAAGGGAPMADNNEGADGVGSSSGNWHCDSTWLGDRVITTSTRTWALPTYNNHLYKQISNGTSGGSTNDNTYFGYSTPWGYFDFNRFHCHFSPRDWQRLINNNWGFRPKRLSFKLFNIQVKEVTQNEGTKTIANNLTSTIQVFTDSEYQLPYVLGSAHQGCLPPFPADVFMIPQYGYLTLNNGSQAVGRSSFYCLEYFPSQMLRTGNNFEFSYTFEDVPFHSSYAHSQSLDRLMNPLIDQYLYYLSRTQSTGGTQGTQQLLFSQAGPANMSAQAKNWLPGPCYRQQRVSTTLSQNNNSNFAWTGATKYHLNGRDSLVNPGVAMATHKDDEERFFPSSGVLMFGKQGAGRDNVDYSSVMLTSEEEIKTTNPVATEQYGVVADNLQQTNTGPIVGNVNSQGALPGMVWQNRDVYLQGPIWAKIPHTDGNFHPSPLMGGFGLKHPPPQILIKNTPVPADPPTTFSQAKLASFITQYSTGQVSVEIEWELQKENSKRWNPEIQYTSNYYKSTNVDFAVNTEGTYSEPRPIGTRYLTRNL

SEQ ID NO: 2479 - DNA, 2172 bp, Artificial Sequence
  Synthetic polynucleotide
atgtcttttgttgatcaccctccagattggttggaagaagttggtgaaggtcttcgcgagtttttgggccttgaagcgggcccaccgaaaccaaaacccaatcagcagcatcaagatcaagcccgtggtcttgtgctgcctggttataactatctcggacccggaaacggtctcgatcgaggagagcctgtcaacagggcagacgaggtcgcgcgagagcacgacatctcgtacaacgagcagcttgaggcgggagacaacccctacctcaagtacaaccacgcggacgccgagtttcaggagaagctcgccgacgacacatccttcgggggaaacctcggaaaggcagtctttcaggccaagaaaagggttctcgaaccttttggcctggttgaagagggtgctaagacggcccctaccggaaagcggatagacgaccactttccaaaaagaaagaaggctcggaccgaagaggactccaagccttccacctcgtcagacgccgaagctggacccagcggatcccagcagctgcaaatcccagcccaaccagcctcaagtttgggagctgatacaatgtctgcgggaggtggcggcccattgggcgacaataaccaaggtgccgatggagtgggcaatgcctcgggagattggcattgcgattccacgtggatgggggacagagtcgtcaccaagtccacccgaacctgggtgctgcccagctacaacaaccaccagtaccgagagatcaaaagcggctccgtcgacggaagcaacgccaacgcctactttggatacagcaccccctgggggtactttgactttaaccgcttccacagccactggagcccccgagactggcaaagactcatcaacaactactggggcttcagaccccggtccctcagagtcaaaatcttcaacattcaagtcaaagaggtcacggtgcaggactccaccaccaccatcgccaacaacctcacctccaccgtccaagtgtttacggacgacgactaccagctgccctacgtcgtcggcaacgggaccgagggatgcctgccggccttccctccgcaggtctttacgctgccgcagtacggttacgcgacgctgaaccgcgacaacacagaaaatcccaccgagaggagcagcttcttctgcctagagtactttcccagcaagatgctgagaacgggcaacaactttgagtttacctacaactttgaggaggtgcccttccactccagcttcgctcccagtcagaacctgttcaagctggccaacccgctggtggaccagtacttgtaccgcttcgtgagcacaaataacactggcggagtccagttcaacaagaacctggccgggagatacgccaacacctacaaaaactggttcccggggcccatgggccgaacccagggctggaacctgggctccggggtcaaccgcgccagtgtcagcgccttcgccacgaccaataggatggagctcgagggcgcgagttaccaggtgcccccgcagccgaacggcatgaccaacaacctccagggcagcaacacctatgccctggagaacactatgatcttcaacagccagccggcgaacccgggcaccaccgccacgtacctcgagggcaacatgctcatcaccagcgagagcgagacgcagccggtgaaccgcgtggcgtacaacgtcggcgggcagatggccaccaacaaccagagctccaccactgcccccgcgaccggcacgtacaacctccaggaaatcgtgcccggcagcgtgtggatggagagggacgtgtacctccaaggacccatctgggccaagatcccagagacgggggcgcactttcacccctctccggccatgggcggattcggactcaaacacccaccgcccatgatgctcatcaagaacacgcctgtgcccggaaatatcaccagcttctcggacgtgcccgtcagcagcttcatcacccagtacagcaccgggcaggtcaccgtggagatggagtgggagctcaagaaggaaaactccaagaggtggaacccagagatccagtacacaaacaactacaacgacccccagtttgtggactttgccccggacagcaccggggaatacagaaccaccagacctatcggaacccgataccttacccgacccctt

SEQ ID NO: 2480 - protein, 720 aa, Artificial Sequence
  Synthetic polypeptide
MSFVDHPPDWLEEVGEGLREFLGLEAGPPKPKPNQQHQDQARGLVLPGYNYLGPGNGLDRGEPVNRADEVAREHDISYNEQLEAGDNPYLKYNHADAEFQEKLADDTSFGGNLGKAVFQAKKRVLEPFGLVEEGAKTAPTGKRIDDHFPKRKKARTEEDSKPSTSSDAEAGPSGSQQLQIPAQPASSLGADTMSAGGGGPLGDNNQGADGVGNASGDWHCDSTWMGDRVVTKSTRTWVLPSYNNHQYREIKSGSVDGSNANAYFGYSTPWGYFDFNRFHSHWSPRDWQRLINNYWGFRPRSLRVKIFNIQVKEVTVQDSTTTIANNLTSTVQVFTDDDYQLPYVVGNGTEGCLPAFPPQVFTLPQYGYATLNRDNTENPTERSSFFCLEYFPSKMLRTGNNFEFTYNFEEVPFHSSFAPSQNLFKLANPLVDQYLYRFVSTNNTGGVQFNKNLAGRYANTYKNWFPGPMGRTQGWNLGSGVNRASVSAFATTNRMELEGASYQVPPQPNGMTNNLQGSNTYALENTMIFNSQPANPGTTATYLEGNMLITSESETQPVNRVAYNVGGQMATNNQSSTTAPATGTYNLQEIVPGSVWMERDVYLQGPIWAKIPETGAHFHPSPAMGGFGLKHPPPMMLIKNTPVPGNITSFSDVPVSSFITQYSTGQVTVEMEWELKKENSKRWNPEIQYTNNYNDPQFVDFAPDSTGEYRTTRPIGTRYL

SEQ ID NO: 2481 - protein, 724 aa, Adeno-associated virus 5
MSFVDHPPDWLEEVGEGLREFLGLEAGPPKPKPNQQHQDQARGLVLPGYNYLGPGNGLDRGEPVNRADEVAREHDISYNEQLEAGDNPYLKYNHADAEFQEKLADDTSFGGNLGKAVFQAKKRVLEPFGLVEEGAKTAPTGKRIDDHFPKRKKARTEEDSKPSTSSDAEAGPSGSQQLQIPAQPASSLGADTMSAGGGGPLGDNNQGADGVGNASGDWHCDSTWMGDRVVTKSTRTWVLPSYNNHQYREIKSGSVDGSNANAYFGYSTPWGYFDFNRFHSHWSPRDWQRLINNYWGFRPRSLRVKIFNIQVKEVTVQDSTTTIANNLTSTVQVFTDDDYQLPYVVGNGTEGCLPAFPPQVFTLPQYGYATLNRDNTENPTERSSFFCLEYFPSKMLRTGNNFEFTYNFEEVPFHSSFAPSQNLFKLANPLVDQYLYRFVSTNNTGGVQFNKNLAGRYANTYKNWFPGPMGRTQGWNLGSGVNRASVSAFATTNRMELEGASYQVPPQPNGMTNNLQGSNTYALENTMIFNSQPANPGTTATYLEGNMLITSESETQPVNRVAYNVGGQMATNNQSSTTAPATGTYNLQEIVPGSVWMERDVYLQGPIWAKIPETGAHFHPSPAMGGFGLKHPPPMMLIKNTPVPGNITSFSDVPVSSFITQYSTGQVTVEMEWELKKENSKRWNPEIQYTNNYNDPQFVDFAPDSTGEYRTTRPIGTRYLTRPL

SEQ ID NO: 2482 - DNA, 2175 bp, Adeno-associated virus
atgtcttttgttgatcaccctccagattggttggaagaagttggtgaaggtcttcgcgagtttttgggccttgaagcgggcccaccgaaaccaaaacccaatcagcagcatcaagatcaagcccgtggtcttgtgctgcctggttataactatctcggacccggaaacggtctcgatcgaggagagcctgtcaacagggcagacgaggtcgcgcgagagcacgacatctcgtacaacgagcagcttgaggcgggagacaacccctacctcaagtacaaccacgcggacgccgagtttcaggagaagctcgccgacgacacatccttcgggggaaacctcggaaaggcagtctttcaggccaagaaaagggttctcgaaccttttggcctggttgaagagggtgctaagacggcccctaccggaaagcggatagacgaccactttccaaaaagaaagaaggctcggaccgaagaggactccaagccttccacctcgtcagacgccgaagctggacccagcggatcccagcagctgcaaatcccagcccaaccagcctcaagtttgggagctgatacaatgtctgcgggaggtggcggcccattgggcgacaataaccaaggtgccgatggagtgggcaatgcctcgggagattggcattgcgattccacgtggatgggggacagagtcgtcaccaagtccacccgaacctgggtgctgcccagctacaacaaccaccagtaccgagagatcaaaagcggctccgtcgacggaagcaacgccaacgcctactttggatacagcaccccctgggggtactttgactttaaccgcttccacagccactggagcccccgagactggcaaagactcatcaacaactactggggcttcagaccccggtccctcagagtcaaaatcttcaacattcaagtcaaagaggtcacggtgcaggactccaccaccaccatcgccaacaacctcacctccaccgtccaagtgtttacggacgacgactaccagctgccctacgtcgtcggcaacgggaccgagggatgcctgccggccttccctccgcaggtctttacgctgccgcagtacggttacgcgacgctgaaccgcgacaacacagaaaatcccaccgagaggagcagcttcttctgcctagagtactttcccagcaagatgctgagaacgggcaacaactttgagtttacctacaactttgaggaggtgcccttccactccagcttcgctcccagtcagaacctgttcaagctggccaacccgctggtggaccagtacttgtaccgcttcgtgagcacaaataacactggcggagtccagttcaacaagaacctggccgggagatacgccaacacctacaaaaactggttcccggggcccatgggccgaacccagggctggaacctgggctccggggtcaaccgcgccagtgtcagcgccttcgccacgaccaataggatggagctcgagggcgcgagttaccaggtgcccccgcagccgaacggcatgaccaacaacctccagggcagcaacacctatgccctggagaacactatgatcttcaacagccagccggcgaacccgggcaccaccgccacgtacctcgagggcaacatgctcatcaccagcgagagcgagacgcagccggtgaaccgcgtggcgtacaacgtcggcgggcagatggccaccaacaaccagagctccaccactgcccccgcgaccggcacgtacaacctccaggaaatcgtgcccggcagcgtgtggatggagagggacgtgtacctccaaggacccatctgggccaagatcccagagacgggggcgcactttcacccctctccggccatgggcggattcggactcaaacacccaccgcccatgatgctcatcaagaacacgcctgtgcccggaaatatcaccagcttctcggacgtgcccgtcagcagcttcatcacccagtacagcaccgggcaggtcaccgtggagatggagtgggagctcaagaaggaaaactccaagaggtggaacccagagatccagtacacaaacaactacaacgacccccagtttgtggactttgccccggacagcaccggggaatacagaaccaccagacctatcggaacccgataccttacccgacccctttaa

SEQ ID NO: 2483 - DNA, 2208 bp, Artificial Sequence
  Synthetic polynucleotide
atggctgccgatggttatcttccagattggctcgaggacaacctctctgagggcattcgcgagtggtgggacttgaaacctggagccccgaaacccaaagccaaccagcaaaagcaggacgacggccggggtctggtgcttcctggctacaagtacctcggacccttcaacggactcgacaagggggagcccgtcaacgcggcggatgcagcggccctcgagcacgacaaggcctacgaccagcagctcaaagcgggtgacaatccgtacctgcggtataaccacgccgacgccgagtttcaggagcgtctgcaagaagatacgtcttttgggggcaacctcgggcgagcagtcttccaggccaagaagagggttctcgaaccttttggtctggttgaggaaggtgctaagacggctcctggaaagaaacgtccggtagagcagtcgccacaagagccagactcctcctcgggcattggcaagacaggccagcagcccgctaaaaagagactcaattttggtcagactggcgactcagagtcagtccccgacccacaacctctcggagaacctccagcaacccccgctgctgtgggacctactacaatggcttcaggcggtggcgcaccaatggcagacaataacgaaggcgccgacggagtgggtaatgcctcaggaaattggcattgcgattccacatggctgggcgacagagtcatcaccaccagcacccgaacatgggccttgcccacctataacaaccacctctacaagcaaatctccagtgcttcaacgggggccagcaacgacaaccactacttcggctacagcaccccctgggggtattttgatttcaacagattccactgccatttctcaccacgtgactggcagcgactcatcaacaacaattggggattccggcccaagagactcaacttcaagctcttcaacatccaagtcaaggaggtcacgacgaatgatggcgtcacgaccatcgctaataaccttaccagcacggttcaagtcttctcggactcggagtaccagttgccgtacgtcctcggctctgcgcaccagggctgcctccctccgttcccggcggacgtgttcatgattccgcagtacggctacctaacgctcaacaatggcagccaggcagtgggacggtcatccttttactgcctggaatatttcccatcgcagatgctgagaacgggcaataactttaccttcagctacaccttcgaggacgtgcctttccacagcagctacgcgcacagccagagcctggaccggctgatgaatcctctcatcgaccagtacctgtattacctgaacagaactcagaatcagtccggaagtgcccaaaacaaggacttgctgtttagccgggggtctccagctggcatgtctgttcagcccaaaaactggctacctggaccctgttaccggcagcagcgcgtttctaaaacaaaaacagacaacaacaacagcaactttacctggactggtgcttcaaaatataaccttaatgggcgtgaatctataatcaaccctggcactgctatggcctcacacaaagacgacaaagacaagttctttcccatgagcggtgtcatgatttttggaaaggagagcgccggagcttcaaacactgcattggacaatgtcatgatcacagacgaagaggaaatcaaagccactaaccccgtggccaccgaaagatttgggactgtggcagtcaatctccagagcagcagcacagaccctgcgaccggagatgtgcatgttatgggagccttacctggaatggtgtggcaagacagagacgtatacctgcagggtcctatttgggccaaaattcctcacacggatggacactttcacccgtctcctctcatgggcggctttggacttaagcacccgcctcctcagatcctcatcaaaaacacgcctgttcctgcgaatcctccggcagagttttcggctacaaagtttgcttcattcatcacccagtattccacaggacaagtgagcgtggagattgaatgggagctgcagaaagaaaacagcaaacgctggaatcccgaagtgcagtatacatctaactatgcaaaatctgccaacgttgatttcactgtggacaacaatggactttatactgagcctcgccccattggcacccgttacctcacccgtcccctg

SEQ ID NO: 2484 - protein, 736 aa, Adeno-associated virus 6
MAADGYLPDWLEDNLSEGIREWWDLKPGAPKPKANQQKQDDGRGLVLPGYKYLGPFNGLDKGEPVNAADAAALEHDKAYDQQLKAGDNPYLRYNHADAEFQERLQEDTSFGGNLGRAVFQAKKRVLEPFGLVEEGAKTAPGKKRPVEQSPQEPDSSSGIGKTGQQPAKKRLNFGQTGDSESVPDPQPLGEPPATPAAVGPTTMASGGGAPMADNNEGADGVGNASGNWHCDSTWLGDRVITTSTRTWALPTYNNHLYKQISSASTGASNDNHYFGYSTPWGYFDFNRFHCHFSPRDWQRLINNNWGFRPKRLNFKLFNIQVKEVTTNDGVTTIANNLTSTVQVFSDSEYQLPYVLGSAHQGCLPPFPADVFMIPQYGYLTLNNGSQAVGRSSFYCLEYFPSQMLRTGNNFTFSYTFEDVPFHSSYAHSQSLDRLMNPLIDQYLYYLNRTQNQSGSAQNKDLLFSRGSPAGMSVQPKNWLPGPCYRQQRVSKTKTDNNNSNFTWTGASKYNLNGRESIINPGTAMASHKDDKDKFFPMSGVMIFGKESAGASNTALDNVMITDEEEIKATNPVATERFGTVAVNLQSSSTDPATGDVHVMGALPGMVWQDRDVYLQGPIWAKIPHTDGHFHPSPLMGGFGLKHPPPQILIKNTPVPANPPAEFSATKFASFITQYSTGQVSVEIEWELQKENSKRWNPEVQYTSNYAKSANVDFTVDNNGLYTEPRPIGTRYLTRPL

SEQ ID NO: 2485 - protein, 623 aa, Adeno-associated virus 6
MPGFYEIVIKVPSDLDEHLPGISDSFVNWVAEKEWELPPDSDMDLNLIEQAPLTVAEKLQRDFLVQWRRVSKAPEALFFVQFEKGESYFHLHILVETTGVKSMVLGRFLSQIRDKLVQTIYRGIEPTLPNWFAVTKTRNGAGGGNKVVDECYIPNYLLPKTQPELQWAWTNMEEYISACLNLAERKRLVAHDLTHVSQTQEQNKENLNPNSDAPVIRSKTSARYMELVGWLVDRGITSEKQWIQEDQASYISFNAASNSRSQIKAALDNAGKIMALTKSAPDYLVGPAPPADIKTNRIYRILELNGYDPAYAGSVFLGWAQKRFGKRNTIWLFGPATTGKTNIAEAIAHAVPFYGCVNWTNENFPFNDCVDKMVIWWEEGKMTAKVVESAKAILGGSKVRVDQKCKSSAQIDPTPVIVTSNTNMCAVIDGNSTTFEHQQPLQDRMFKFELTRRLEHDFGKVTKQEVKEFFRWAQDHVTEVAHEFYVRKGGANKRPAPDDADKSEPKRACPSVADPSTSDAEGAPVDFADRYQNKCSRHAGMLQMLFPCKTCERMNQNFNICFTHGTRDCSECFPGVSESQPVVRKRTYRKLCAIHHLLGRAPEIACSACDLVNVDLDDCVSEQ

SEQ ID NO: 2486 - DNA, 4683 bp, Adeno-associated virus 6
ttggccactccctctctgcgcgctcgctcgctcactgaggccgggcgaccaaaggtcgcccgacgcccgggctttgcccgggcggcctcagtgagcgagcgagcgcgcagagagggagtggccaactccatcactaggggttcctggaggggtggagtcgtgacgtgaattacgtcatagggttagggaggtcctgtattagaggtcacgtgagtgttttgcgacattttgcgacaccatgtggtcacgctgggtatttaagcccgagtgagcacgcagggtctccattttgaagcgggaggtttgaacgcgcagcgccatgccggggttttacgagattgtgattaaggtccccagcgaccttgacgagcatctgcccggcatttctgacagctttgtgaactgggtggccgagaaggaatgggagttgccgccagattctgacatggatctgaatctgattgagcaggcacccctgaccgtggccgagaagctgcagcgcgacttcctggtccagtggcgccgcgtgagtaaggccccggaggccctcttctttgttcagttcgagaagggcgagtcctacttccacctccatattctggtggagaccacgggggtcaaatccatggtgctgggccgcttcctgagtcagattagggacaagctggtgcagaccatctaccgcgggatcgagccgaccctgcccaactggttcgcggtgaccaagacgcgtaatggcgccggaggggggaacaaggtggtggacgagtgctacatccccaactacctcctgcccaagactcagcccgagctgcagtgggcgtggactaacatggaggagtatataagcgcgtgtttaaacctggccgagcgcaaacggctcgtggcgcacgacctgacccacgtcagccagacccaggagcagaacaaggagaatctgaaccccaattctgacgcgcctgtcatccggtcaaaaacctccgcacgctacatggagctggtcgggtggctggtggaccggggcatcacctccgagaagcagtggatccaggaggaccaggcctcgtacatctccttcaacgccgcctccaactcgcggtcccagatcaaggccgctctggacaatgccggcaagatcatggcgctgaccaaatccgcgcccgactacctggtaggccccgctccgcccgccgacattaaaaccaaccgcatttaccgcatcctggagctgaacggctacgaccctgcctacgccggctccgtctttctcggctgggcccagaaaaggttcggaaaacgcaacaccatctggctgtttgggccggccaccacgggcaagaccaacatcgcggaagccatcgcccacgccgtgcccttctacggctgcgtcaactggaccaatgagaactttcccttcaacgattgcgtcgacaagatggtgatctggtgggaggagggcaagatgacggccaaggtcgtggagtccgccaaggccattctcggcggcagcaaggtgcgcgtggaccaaaagtgcaagtcgtccgcccagatcgatcccacccccgtgatcgtcacctccaacaccaacatgtgcgccgtgattgacgggaacagcaccaccttcgagcaccagcagccgttgcaggaccggatgttcaaatttgaactcacccgccgtctggagcatgactttggcaaggtgacaaagcaggaagtcaaagagttcttccgctgggcgcaggatcacgtgaccgaggtggcgcatgagttctacgtcagaaagggtggagccaacaagagacccgcccccgatgacgcggataaaagcgagcccaagcgggcctgcccctcagtcgcggatccatcgacgtcagacgcggaaggagctccggtggactttgccgacaggtaccaaaacaaatgttctcgtcacgcgggcatgcttcagatgctgtttccctgcaaaacatgcgagagaatgaatcagaatttcaacatttgcttcacgcacgggaccagagactgttcagaatgtttccccggcgtgtcagaatctcaaccggtcgtcagaaagaggacgtatcggaaactctgtgccattcatcatctgctggggcgggctcccgagattgcttgctcggcctgcgatctggtcaacgtggatctggatgactgtgtttctgagcaataaatgacttaaaccaggtatggctgccgatggttatcttccagattggctcgaggacaacctctctgagggcattcgcgagtggtgggacttgaaacctggagccccgaaacccaaagccaaccagcaaaagcaggacgacggccggggtctggtgcttcctggctacaagtacctcggacccttcaacggactcgacaagggggagcccgtcaacgcggcggatgcagcggccctcgagcacgacaaggcctacgaccagcagctcaaagcgggtgacaatccgtacctgcggtataaccacgccgacgccgagtttcaggagcgtctgcaagaagatacgtcttttgggggcaacctcgggcgagcagtcttccaggccaagaagagggttctcgaaccttttggtctggttgaggaaggtgctaagacggctcctggaaagaaacgtccggtagagcagtcgccacaagagccagactcctcctcgggcattggcaagacaggccagcagcccgctaaaaagagactcaattttggtcagactggcgactcagagtcagtccccgacccacaacctctcggagaacctccagcaacccccgctgctgtgggacctactacaatggcttcaggcggtggcgcaccaatggcagacaataacgaaggcgccgacggagtgggtaatgcctcaggaaattggcattgcgattccacatggctgggcgacagagtcatcaccaccagcacccgaacatgggccttgcccacctataacaaccacctctacaagcaaatctccagtgcttcaacgggggccagcaacgacaaccactacttcggctacagcaccccctgggggtattttgatttcaacagattccactgccatttctcaccacgtgactggcagcgactcatcaacaacaattggggattccggcccaagagactcaacttcaagctcttcaacatccaagtcaaggaggtcacgacgaatgatggcgtcacgaccatcgctaataaccttaccagcacggttcaagtcttctcggactcggagtaccagttgccgtacgtcctcggctctgcgcaccagggctgcctccctccgttcccggcggacgtgttcatgattccgcagtacggctacctaacgctcaacaatggcagccaggcagtgggacggtcatccttttactgcctggaatatttcccatcgcagatgctgagaacgggcaataactttaccttcagctacaccttcgaggacgtgcctttccacagcagctacgcgcacagccagagcctggaccggctgatgaatcctctcatcgaccagtacctgtattacctgaacagaactcagaatcagtccggaagtgcccaaaacaaggacttgctgtttagccgggggtctccagctggcatgtctgttcagcccaaaaactggctacctggaccctgttaccggcagcagcgcgtttctaaaacaaaaacagacaacaacaacagcaactttacctggactggtgcttcaaaatataaccttaatgggcgtgaatctataatcaaccctggcactgctatggcctcacacaaagacgacaaagacaagttctttcccatgagcggtgtcatgatttttggaaaggagagcgccggagcttcaaacactgcattggacaatgtcatgatcacagacgaagaggaaatcaaagccactaaccccgtggccaccgaaagatttgggactgtggcagtcaatctccagagcagcagcacagaccctgcgaccggagatgtgcatgttatgggagccttacctggaatggtgtggcaagacagagacgtatacctgcagggtcctatttgggccaaaattcctcacacggatggacactttcacccgtctcctctcatgggcggctttggacttaagcacccgcctcctcagatcctcatcaaaaacacgcctgttcctgcgaatcctccggcagagttttcggctacaaagtttgcttcattcatcacccagtattccacaggacaagtgagcgtggagattgaatgggagctgcagaaagaaaacagcaaacgctggaatcccgaagtgcagtatacatctaactatgcaaaatctgccaacgttgatttcactgtggacaacaatggactttatactgagcctcgccccattggcacccgttacctcacccgtcccctgtaattgtgtgttaatcaataaaccggttaattcgtgtcagttgaactttggtctcatgtcgttattatcttatctggtcaccatagcaaccggttacacattaactgcttagttgcgcttcgcgaatacccctagtgatggagttgcccactccctctatgcgcgctcgctcgctcggtggggccggcagagcagagctctgccgtctgcggacctttggtccgcaggccccaccgagcgagcgagcgcgcatagagggagtgggcaa

SEQ ID NO: 2487 - DNA, 2211 bp, Artificial Sequence
  Synthetic polynucleotide
atggctgccgatggttatcttccagattggctcgaggacaacctctctgagggcattcgcgagtggtgggacttgaaacctggagccccgaaacccaaagccaaccagcaaaagcaggacgacggccggggtctggtgcttcctggctacaagtacctcggacccttcaacggactcgacaagggggagcccgtcaacgcggcggatgcagcggccctcgagcacgacaaggcctacgaccagcagctcaaagcgggtgacaatccgtacctgcggtataaccacgccgacgccgagtttcaggagcgtctgcaagaagatacgtcttttgggggcaacctcgggcgagcagtcttccaggccaagaagagggttctcgaaccttttggtctggttgaggaaggtgctaagacggctcctggaaagaaacgtccggtagagcagtcgccacaagagccagactcctcctcgggcattggcaagacaggccagcagcccgctaaaaagagactcaattttggtcagactggcgactcagagtcagtccccgacccacaacctctcggagaacctccagcaacccccgctgctgtgggacctactacaatggcttcaggcggtggcgcaccaatggcagacaataacgaaggcgccgacggagtgggtaatgcctcaggaaattggcattgcgattccacatggctgggcgacagagtcatcaccaccagcacccgaacatgggccttgcccacctataacaaccacctctacaagcaaatctccagtgcttcaacgggggccagcaacgacaaccactacttcggctacagcaccccctgggggtattttgatttcaacagattccactgccatttctcaccacgtgactggcagcgactcatcaacaacaattggggattccggcccaagagactcaacttcaagctcttcaacatccaagtcaaggaggtcacgacgaatgatggcgtcacgaccatcgctaataaccttaccagcacggttcaagtcttctcggactcggagtaccagttgccgtacgtcctcggctctgcgcaccagggctgcctccctccgttcccggcggacgtgttcatgattccgcagtacggctacctaacgctcaacaatggcagccaggcagtgggacggtcatccttttactgcctggaatatttcccatcgcagatgctgagaacgggcaataactttaccttcagctacaccttcgaggacgtgcctttccacagcagctacgcgcacagccagagcctggaccggctgatgaatcctctcatcgaccagtacctgtattacctgaacagaactcagaatcagtccggaagtgcccaaaacaaggacttgctgtttagccgggggtctccagctggcatgtctgttcagcccaaaaactggctacctggaccctgttaccggcagcagcgcgtttctaaaacaaaaacagacaacaacaacagcaactttacctggactggtgcttcaaaatataaccttaatgggcgtgaatctataatcaaccctggcactgctatggcctcacacaaagacgacaaagacaagttctttcccatgagcggtgtcatgatttttggaaaggagagcgccggagcttcaaacactgcattggacaatgtcatgatcacagacgaagaggaaatcaaagccactaaccccgtggccaccgaaagatttgggactgtggcagtcaatctccagagcagcagcacagaccctgcgaccggagatgtgcatgttatgggagccttacctggaatggtgtggcaagacagagacgtatacctgcagggtcctatttgggccaaaattcctcacacggatggacactttcacccgtctcctctcatgggcggctttggacttaagcacccgcctcctcagatcctcatcaaaaacacgcctgttcctgcgaatcctccggcagagttttcggctacaaagtttgcttcattcatcacccagtattccacaggacaagtgagcgtggagattgaatgggagctgcagaaagaaaacagcaaacgctggaatcccgaagtgcagtatacatctaactatgcaaaatctgccaacgttgatttcactgtggacaacaatggactttatactgagcctcgccccattggcacccgttacctcacccgtcccctgtaa

SEQ ID NO: 2488 - protein, 736 aa, Artificial Sequence; identical to SEQ ID NO: 2484
  Synthetic polypeptide

SEQ ID NO: 2489 - protein, 736 aa, Artificial Sequence
  Synthetic polypeptide
MAADGYLPDWLEDNLSEGIREWWDLKPGAPKPKANQQKQDDGRGLVLPGYKYLGPFNGLDKGEPVNAADAAALEHDKAYDQQLKAGDNPYLRYNHADAEFQERLQEDTSFGGNLGRAVFQAKKRVLEPFGLVEEGAKTAPGKKRPVEQSPQEPDSSSGIGKTGQQPAKKRLNFGQTGDSESVPDPQPLGEPPATPAAVGPTTMASGGGAPMADNNEGADGVGNASGNWHCDSTWLGDRVITTSTRTWALPTYNNHLYKQISSASTGASNDNHYFGYSTPWGYFDFNRFHCHFSPRDWQRLINNNWGFRPKRLNFKLFNIQVKEVTTNDGVTTIANNLTSTVQVFSDSEYQLPYVLGSAHQGCLPPFPADVFMIPQYGYLTLNNGSQAVGRSSFYCLEYFPSQMLRTGNNFTFSYTFEDVPFHSSYAHSQSLDRLMNPLIDQYLYYLNRTQNQSGSAQNKDLLFSRGSPAGMSVQPKNWLPGPCYRQQRVSKTKTDNNNSNFTWTGASKYNLNGRESIINPGTAMASHKDDEDKFFPMSGVMIFGKESAGASNTALDNVMITDEEEIKATNPVATERFGTVAVNLQSSSTDPATGDVHVMGALPGMVWQDRDVYLQGPIWAKIPHTDGHFHPSPLMGGFGLKHPPPQILIKNTPVPANPPAEFSATKFASFITQYSTGQVSVEIEWELQKENSKRWNPEVQYTSNYAKSANVDFTVDNNGLYTEPRPIGTRYLTRPL

SEQ ID NO: 2490 - protein, 736 aa, Artificial Sequence
  Synthetic polypeptide
MAADGYLPDWLEDNLSEGIREWWDLKPGAPKPKANQQKQDDGRGLVLPGYKYLGPFNGLDKGEPVNAADAAALEHDKAYDQQLKAGDNPYLRYNHADAEFQERLQEDTSFGGNLGRAVFQAKKRVLEPLGLVEEGAKTAPGKKRPVEQSPQEPDSSSGIGKTGQQPAKKRLNFGQTGDSESVPDPQPLGEPPATPAAVGPTTMASGGGAPMADNNEGADGVGNASGNWHCDSTWLGDRVITTSTRTWALPTYNNHLYKQISSASTGASNDNHYFGYSTPWGYFDFNRFHCHFSPRDWQRLINNNWGFRPKRLNFKLFNIQVKEVTTNDGVTTIANNLTSTVQVFSDSEYQLPYVLGSAHQGCLPPFPADVFMIPQYGYLTLNNGSQAVGRSSFYCLEYFPSQMLRTGNNFTFSYTFEDVPFHSSYAHSQSLDRLMNPLIDQYLYYLNRTQNQSGSAQNKDLLFSRGSPAGMSVQPKNWLPGPCYRQQRVSKTKTDNNNSNFTWTGASKYNLNGRESIINPGTAMASHKDDEDKFFPMSGVMIFGKESAGASNTALDNVMITDEEEIKATNPVATERFGTVAVNLQSSSTDPATGDVHVMGALPGMVWQDRDVYLQGPIWAKIPHTDGHFHPSPLMGGFGLKHPPPQILIKNTPVPANPPAEFSATKFASFITQYSTGQVSVEIEWELQKENSKRWNPEVQYTSNYAKSANVDFTVDNNGLYTEPRPIGTRYLTRPL

SEQ ID NO: 2491 - protein, 736 aa, Artificial Sequence
  Synthetic polypeptide
MAADGYLPDWLEDNLSEGIREWWDLKPGAPKPKANQQKQDDGRGLVLPGYKYLGPFNGLDKGEPVNAADAAALEHDKAYDQQLKAGDNPYLRYNHADAEFQERLQEDTSFGGNLGRAVFQAKKRVLEPLGLVEEGAKTAPGKKRPVEQSPQEPDSSSGIGKTGQQPAKKRLNFGQTGDSESVPDPQPLGEPPATPAAVGPTTMASGGGAPMADNNEGADGVGNASGNWHCDSTWLGDRVITTSTRTWALPTYNNHLYKQISSASTGASNDNHYFGYSTPWGYFDFNRFHCHFSPRDWQRLINNNWGFRPKRLNFKLFNIQVKEVTTNDGVTTIANNLTSTVQVFSDSEYQLPYVLGSAHQGCLPPFPADVFMIPQYGYLTLNNGSQAVGRSSFYCLEYFPSQMLRTGNNFTFSYTFEDVPFHSSYAHSQSLDRLMNPLIDQYLYYLNRTQNQSGSAQNKDLLFSRGSPAGMSVQPKNWLPGPCYRQQRVSKTKTDNNNSNFTWTGASKYNLNGRESIINPGTAMASHKDDKDKFFPMSGVMIFGKESAGASNTALDNVMITDEEEIKATNPVATERFGTVAVNLQSSSTDPATGDVHVMGALPGMVWQDRDVYLQGPIWAKIPHTDGHFHPSPLMGGFGLKHPPPQILIKNTPVPANPPAEFSATKFASFITQYSTGQVSVEIEWELQKENSKRWNPEVQYTSNYAKSANVDFTVDNNGLYTEPRPIGTRYLTRPL

SEQ ID NO: 2492 - DNA, 2214 bp, Artificial Sequence
  Synthetic polynucleotide
atggctgccgatggttatcttccagattggctcgaggacaacctctctgagggcattcgcgagtggtgggacctgaaacctggagccccgaaacccaaagccaaccagcaaaagcaggacaacggccggggtctggtgcttcctggctacaagtacctcggacccttcaacggactcgacaagggggagcccgtcaacgcggcggacgcagcggccctcgagcacgacaaggcctacgaccagcagctcaaagcgggtgacaatccgtacctgcggtataaccacgccgacgccgagtttcaggagcgtctgcaagaagatacgtcatttgggggcaacctcgggcgagcagtcttccaggccaagaagcgggttctcgaacctctcggtctggttgaggaaggcgctaagacggctcctgcaaagaagagaccggtagagccgtcacctcagcgttcccccgactcctccacgggcatcggcaagaaaggccagcagcccgccagaaagagactcaatttcggtcagactggcgactcagagtcagtccccgaccctcaacctctcggagaacctccagcagcgccctctagtgtgggatctggtacagtggctgcaggcggtggcgcaccaatggcagacaataacgaaggtgccgacggagtgggtaatgcctcaggaaattggcattgcgattccacatggctgggcgacagagtcattaccaccagcacccgaacctgggccctgcccacctacaacaaccacctctacaagcaaatctccagtgaaactgcaggtagtaccaacgacaacacctacttcggctacagcaccccctgggggtattttgactttaacagattccactgccacttctcaccacgtgactggcagcgactcatcaacaacaactggggattccggcccaagaagctgcggttcaagctcttcaacatccaggtcaaggaggtcacgacgaatgacggcgttacgaccatcgctaataaccttaccagcacgattcaggtattctcggactcggaataccagctgccgtacgtcctcggctctgcgcaccagggctgcctgcctccgttcccggcggacgtcttcatgattcctcagtacggctacctgactctcaacaatggcagtcagtctgtgggacgttcctccttctactgcctggagtacttcccctctcagatgctgagaacgggcaacaactttgagttcagctacagcttcgaggacgtgcctttccacagcagctacgcacacagccagagcctggaccggctgatgaatcccctcatcgaccagtacttgtactacctggccagaacacagagtaacccaggaggcacagctggcaatcgggaactgcagttttaccagggcgggccttcaactatggccgaacaagccaagaattggttacctggaccttgcttccggcaacaaagagtctccaaaacgctggatcaaaacaacaacagcaactttgcttggactggtgccaccaaatatcacctgaacggcagaaactcgttggttaatcccggcgtcgccatggcaactcacaaggacgacgaggaccgctttttcccatccagcggagtcctgatttttggaaaaactggagcaactaacaaaactacattggaaaatgtgttaatgacaaatgaagaagaaattcgtcctactaatcctgtagccacggaagaatacgggatagtcagcagcaacttacaagcggctaatactgcagcccagacacaagttgtcaacaaccagggagccttacctggcatggtctggcagaaccgggacgtgtacctgcagggtcccatctgggccaagattcctcacacggatggcaactttcacccgtctcctttgatgggcggctttggacttaaacatccgcctcctcagatcctgatcaagaacactcccgttcccgctaatcctccggaggtgtttactcctgccaagtttgcttcgttcatcacacagtacagcaccggacaagtcagcgtggaaatcgagtgggagctgcagaaggaaaacagcaagcgctggaacccggagattcagtacacctccaactttgaaaagcagactggtgtggactttgccgttgacagccagggtgtttactctgagcctcgccctattggcactcgttacctcacccgtaatctgtaa

SEQ ID NO: 2493 - protein, 738 aa, Artificial Sequence
  Synthetic polypeptide
MAADGYLPDWLEDNLSEGIREWWALKPGAPKPKANQQKQDDGRGLVLPGYKYLGPFNGLDKGEPVNAADAAALEHDKAYDQQLQAGDNPYLRYNHADAEFQERLQEDTSFGGNLGRAVFQAKKRVLEPLGLVEEGAKTAPGKKRPVEPSPQRSPDSSTGIGKKGQQPARKRLNFGQTGDSESVPDPQPLGEPPAAPSGVGPNTMAAGGGAPMADNNEGADGVGSSSGNWHCDSTWLGDRVITTSTRTWALPTYNNHLYKQISNGTSGGATNDNTYFGYSTPWGYFDFNRFHCHFSPRDWQRLINNNWGFRPKRLSFKLFNIQVKEVTQNEGTKTIANNLTSTIQVFTDSEYQLPYVLGSAHQGCLPPFPADVFMIPQYGYLTLNNGSQAVGRSSFYCLEYFPSQMLRTGNNFQFTYTFEDVPFHSSYAHSQSLDRLMNPLIDQYLYYLSRTQTTGGTANTQTLGFSQGGPNTMANQAKNWLPGPCYRQQRVSTTTGQNNNSNFAWTAGTKYHLNGRNSLANPGIAMATHKDDEERFFPSNGILIFGKQNAARDNADYSDVMLTSEEEIKTTNPVATEEYGIVADNLQQQNTAPQIGTVNSQGALPGMVWQNRDVYLQGPIWAKIPHTDGNFHPSPLMGGFGLKHPPPQILIKNTPVPADPPTTFNQSKLNSFITQYSTGQVSVEIEWELQKENSKRWNPEIQYTSNYYKSTSVDFAVNTEGVYSEPRPIGTRYLTRNL

SEQ ID NO: 2494 - protein, 737 aa, Adeno-associated virus 7
MAADGYLPDWLEDNLSEGIREWWDLKPGAPKPKANQQKQDNGRGLVLPGYKYLGPFNGLDKGEPVNAADAAALEHDKAYDQQLKAGDNPYLRYNHADAEFQERLQEDTSFGGNLGRAVFQAKKRVLEPLGLVEEGAKTAPAKKRPVEPSPQRSPDSSTGIGKKGQQPARKRLNFGQTGDSESVPDPQPLGEPPAAPSSVGSGTVAAGGGAPMADNNEGADGVGNASGNWHCDSTWLGDRVITTSTRTWALPTYNNHLYKQISSETAGSTNDNTYFGYSTPWGYFDFNRFHCHFSPRDWQRLINNNWGFRPKKLRFKLFNIQVKEVTTNDGVTTIANNLTSTIQVFSDSEYQLPYVLGSAHQGCLPPFPADVFMIPQYGYLTLNNGSQSVGRSSFYCLEYFPSQMLRTGNNFEFSYSFEDVPFHSSYAHSQSLDRLMNPLIDQYLYYLARTQSNPGGTAGNRELQFYQGGPSTMAEQAKNWLPGPCFRQQRVSKTLDQNNNSNFAWTGATKYHLNGRNSLVNPGVAMATHKDDEDRFFPSSGVLIFGKTGATNKTTLENVLMTNEEEIRPTNPVATEEYGIVSSNLQAANTAAQTQVVNNQGALPGMVWQNRDVYLQGPIWAKIPHTDGNFHPSPLMGGFGLKHPPPQILIKNTPVPANPPEVFTPAKFASFITQYSTGQVSVEIEWELQKENSKRWNPEIQYTSNFEKQTGVDFAVDSQGVYSEPRPIGTRYLTRNL

SEQ ID NO: 2495 - protein, 623 aa, Adeno-associated virus 7
MPGFYEIVIKVPSDLDEHLPGISDSFVNWVAEKEWELPPDSDMDLNLIEQAPLTVAEKLQRDFLVQWRRVSKAPEALFFVQFEKGESYFHLHVLVETTGVKSMVLGRFLSQIREKLVQTIYRGVEPTLPNWFAVTKTRNGAGGGNKVVDECYIPNYLLPKTQPELQWAWTNMEEYISACLNLAERKRLVAQHLTHVSQTQEQNKENLNPNSDAPVIRSKTSARYMELVGWLVDRGITSEKQWIQEDQASYISFNAASNSRSQIKAALDNAGKIMALTKSAPDYLVGPSLPADIKTNRIYRILELNGYDPAYAGSVFLGWAQKKFGKRNTIWLFGPATTGKTNIAEAIAHAVPFYGCVNWTNENFPFNDCVDKMVIWWEEGKMTAKVVESAKAILGGSKVRVDQKCKSSAQIDPTPVIVTSNTNMCAVIDGNSTTFEHQQPLQDRMFKFELTRRLEHDFGKVTKQEVKEFFRWASDHVTEVAHEFYVRKGGASKRPAPDDADISEPKRACPSVADPSTSDAEGAPVDFADRYQNKCSRHAGMIQMLFPCKTCERMNQNFNICFTHGVRDCLECFPGVSESQPVVRKKTYRKLCAIHHLLGRAPEIACSACDLVNVDLDDCVSEQ

SEQ ID NO: 2496 - DNA, 4721 bp, Adeno-associated virus 7
ttggccactccctctatgcgcgctcgctcgctcggtggggcctgcggaccaaaggtccgcagacggcagagctctgctctgccggccccaccgagcgagcgagcgcgcatagagggagtggccaactccatcactaggggtaccgcgaagcgcctcccacgctgccgcgtcagcgctgacgtaaatcacgtcataggggagtggtcctgtattagctgtcacgtgagtgcttttgcgacattttgcgacaccacgtggccatttgaggtatatatggccgagtgagcgagcaggatctccattttgaccgcgaaatttgaacgagcagcagccatgccgggtttctacgagatcgtgatcaaggtgccgagcgacctggacgagcacctgccgggcatttctgactcgtttgtgaactgggtggccgagaaggaatgggagctgcccccggattctgacatggatctgaatctgatcgagcaggcacccctgaccgtggccgagaagctgcagcgcgacttcctggtccaatggcgccgcgtgagtaaggccccggaggccctgttctttgttcagttcgagaagggcgagagctacttccaccttcacgttctggtggagaccacgggggtcaagtccatggtgctaggccgcttcctgagtcagattcgggagaagctggtccagaccatctaccgcggggtcgagcccacgctgcccaactggttcgcggtgaccaagacgcgtaatggcgccggcggggggaacaaggtggtggacgagtgctacatccccaactacctcctgcccaagacccagcccgagctgcagtgggcgtggactaacatggaggagtatataagcgcgtgtttgaacctggccgaacgcaaacggctcgtggcgcagcacctgacccacgtcagccagacgcaggagcagaacaaggagaatctgaaccccaattctgacgcgcccgtgatcaggtcaaaaacctccgcgcgctacatggagctggtcgggtggctggtggaccggggcatcacctccgagaagcagtggatccaggaggaccaggcctcgtacatctccttcaacgccgcctccaactcgcggtcccagatcaaggccgcgctggacaatgccggcaagatcatggcgctgaccaaatccgcgcccgactacctggtggggccctcgctgcccgcggacattaaaaccaaccgcatctaccgcatcctggagctgaacgggtacgatcctgcctacgccggctccgtctttctcggctgggcccagaaaaagttcgggaagcgcaacaccatctggctgtttgggcccgccaccaccggcaagaccaacattgcggaagccatcgcccacgccgtgcccttctacggctgcgtcaactggaccaatgagaactttcccttcaacgattgcgtcgacaagatggtgatctggtgggaggagggcaagatgacggccaaggtcgtggagtccgccaaggccattctcggcggcagcaaggtgcgcgtggaccaaaagtgcaagtcgtccgcccagatcgaccccacccccgtgatcgtcacctccaacaccaacatgtgcgccgtgattgacgggaacagcaccaccttcgagcaccagcagccgttgcaggaccggatgttcaaatttgaactcacccgccgtctggagcacgactttggcaaggtgacgaagcaggaagtcaaagagttcttccgctgggccagtgatcacgtgaccgaggtggcgcatgagttctacgtcagaaagggcggagccagcaaaagacccgcccccgatgacgcggatataagcgagcccaagcgggcctgcccctcagtcgcggatccatcgacgtcagacgcggaaggagctccggtggactttgccgacaggtaccaaaacaaatgttctcgtcacgcgggcatgattcagatgctgtttccctgcaaaacgtgcgagagaatgaatcagaatttcaacatttgcttcacacacggggtcagagactgtttagagtgtttccccggcgtgtcagaatctcaaccggtcgtcagaaaaaagacgtatcggaaactctgcgcgattcatcatctgctggggcgggcgcccgagattgcttgctcggcctgcgacctggtcaacgtggacctggacgactgcgtttctgagcaataaatgacttaaaccaggtatggctgccgatggttatcttccagattggctcgaggacaacctctctgagggcattcgcgagtggtgggacctgaaacctggagccccgaaacccaaagccaaccagcaaaagcaggacaacggccggggtctggtgcttcctggctacaagtacctcggacccttcaacggactcgacaagggggagcccgtcaacgcggcggacgcagcggccctcgagcacgacaaggcctacgaccagcagctcaaagcgggtgacaatccgtacctgcggtataaccacgccgacgccgagtttcaggagcgtctgcaagaagatacgtcatttgggggcaacctcgggcgagcagtcttccaggccaagaagcgggttctcgaacctctcggtctggttgaggaaggcgctaagacggctcctgcaaagaagagaccggtagagccgtcacctcagcgttcccccgactcctccacgggcatcggcaagaaaggccagcagcccgccagaaagagactcaatttcggtcagactggcgactcagagtcagtccccgaccctcaacctctcggagaacctccagcagcgccctctagtgtgggatctggtacagtggctgcaggcggtggcgcaccaatggcagacaataacgaaggtgccgacggagtgggtaatgcctcaggaaattggcattgcgattccacatggctgggcgacagagtcattaccaccagcacccgaacctgggccctgcccacctacaacaaccacctctacaagcaaatctccagtgaaactgcaggtagtaccaacgacaacacctacttcggctacagcaccccctgggggtattttgactttaacagattccactgccacttctcaccacgtgactggcagcgactcatcaacaacaactggggattccggcccaagaagctgcggttcaagctcttcaacatccaggtcaaggaggtcacgacgaatgacggcgttacgaccatcgctaataaccttaccagcacgattcaggtattctcggactcggaataccagctgccgtacgtcctcggctctgcgcaccagggctgcctgcctccgttcccggcggacgtcttcatgattcctcagtacggctacctgactctcaacaatggcagtcagtctgtgggacgttcctccttctactgcctggagtacttcccctctcagatgctgagaacgggcaacaactttgagttcagctacagcttcgaggacgtgcctttccacagcagctacgcacacagccagagcctggaccggctgatgaatcccctcatcgaccagtacttgtactacctggccagaacacagagtaacccaggaggcacagctggcaatcgggaactgcagttttaccagggcgggccttcaactatggccgaacaagccaagaattggttacctggaccttgcttccggcaacaaagagtctccaaaacgctggatcaaaacaacaacagcaactttgcttggactggtgccaccaaatatcacctgaacggcagaaactcgttggttaatcccggcgtcgccatggcaactcacaaggacgacgaggaccgctttttcccatccagcggagtcctgatttttggaaaaactggagcaactaacaaaactacattggaaaatgtgttaatgacaaatgaagaagaaattcgtcctactaatcctgtagccacggaagaatacgggatagtcagcagcaacttacaagcggctaatactgcagcccagacacaagttgtcaacaaccagggagccttacctggcatggtctggcagaaccgggacgtgtacctgcagggtcccatctgggccaagattcctcacacggatggcaactttcacccgtctcctttgatgggcggctttggacttaaacatccgcctcctcagatcctgatcaagaacactcccgttcccgctaatcctccggaggtgtttactcctgccaagtttgcttcgttcatcacacagtacagcaccggacaagtcagcgtggaaatcgagtgggagctgcagaaggaaaacagcaagcgctggaacccggagattcagtacacctccaactttgaaaagcagactggtgtggactttgccgttgacagccagggtgtttactctgagcctcgccctattggcactcgttacctcacccgtaatctgtaattgcatgttaatcaataaaccggttgattcgtttcagttgaactttggtctcctgtgcttcttatcttatcggtttccatagcaactggttacacattaactgcttgggtgcgcttcacgataagaacactgacgtcaccgcggtacccctagtgatggagttggccactccctctatgcgcgctcgctcgctcggtggggcctgcggaccaaaggtccgcagacggcagagctctgctctgccggccccaccgagcgagcgagcgcgcatagagggagtggccaa

SEQ ID NO: 2497 - DNA, 2214 bp, Artificial Sequence; identical to SEQ ID NO: 2492
  Synthetic polynucleotide

SEQ ID NO: 2498 - protein, 737 aa, Artificial Sequence; identical to SEQ ID NO: 2494
  Synthetic polypeptide

SEQ ID NO: 2499 - DNA, 2217 bp, Artificial Sequence
  Synthetic polynucleotide
atggctgccgatggttatcttccagattggctcgaggacaacctctctgagggcattcgcgagtggtgggcgctgaaacctggagccccgaagcccaaagccaaccagcaaaagcaggacgacggccggggtctggtgcttcctggctacaagtacctcggacccttcaacggactcgacaagggggagcccgtcaacgcggcggacgcagcggccctcgagcacgacaaggcctacgaccagcagctgcaggcgggtgacaatccgtacctgcggtataaccacgccgacgccgagtttcaggagcgtctgcaagaagatacgtcttttgggggcaacctcgggcgagcagtcttccaggccaagaagcgggttctcgaacctctcggtctggttgaggaaggcgctaagacggctcctggaaagaagagaccggtagagccatcaccccagcgttctccagactcctctacgggcatcggcaagaaaggccaacagcccgccagaaaaagactcaattttggtcagactggcgactcagagtcagttccagaccctcaacctctcggagaacctccagcagcgccctctggtgtgggacctaatacaatggctgcaggcggtggcgcaccaatggcagacaataacgaaggcgccgacggagtgggtagttcctcgggaaattggcattgcgattccacatggctgggcgacagagtcatcaccaccagcacccgaacctgggccctgcccacctacaacaaccacctctacaagcaaatctccaacgggacatcgggaggagccaccaacgacaacacctacttcggctacagcaccccctgggggtattttgactttaacagattccactgccacttttcaccacgtgactggcagcgactcatcaacaacaactggggattccggcccaagagactcagcttcaagctcttcaacatccaggtcaaggaggtcacgcagaatgaaggcaccaagaccatcgccaataacctcaccagcaccatccaggtgtttacggactcggagtaccagctgccgtacgttctcggctctgcccaccagggctgcctgcctccgttcccggcggacgtgttcatgattccccagtacggctacctaacactcaacaacggtagtcaggccgtgggacgctcctccttctactgcctggaatactttccttcgcagatgctgagaaccggcaacaacttccagtttacttacaccttcgaggacgtgcctttccacagcagctacgcccacagccagagcttggaccggctgatgaatcctctgattgaccagtacctgtactacttgtctcggactcaaacaacaggaggcacggcaaatacgcagactctgggcttcagccaaggtgggcctaatacaatggccaatcaggcaaagaactggctgccaggaccctgttaccgccaacaacgcgtctcaacgacaaccgggcaaaacaacaatagcaactttgcctggactgctgggaccaaataccatctgaatggaagaaattcattggctaatcctggcatcgctatggcaacacacaaagacgacgaggagcgtttttttcccagtaacgggatcctgatttttggcaaacaaaatgctgccagagacaatgcggattacagcgatgtcatgctcaccagcgaggaagaaatcaaaaccactaaccctgtggctacagaggaatacggtatcgtggcagataacttgcagcagcaaaacacggctcctcaaattggaactgtcaacagccagggggccttacccggtatggtctggcagaaccgggacgtgtacctgcagggtcccatctgggccaagattcctcacacggacggcaacttccacccgtctccgctgatgggcggctttggcctgaaacatcctccgcctcagatcctgatcaagaacacgcctgtacctgcggatcctccgaccaccttcaaccagtcaaagctgaactctttcatcacgcaatacagcaccggacaggtcagcgtggaaattgaatgggagctgcagaaggaaaacagcaagcgctggaaccccgagatccagtacacctccaactactacaaatctacaagtgtggactttgctgttaatacagaaggcgtgtactctgaaccccgccccattggcacccgttacctcacccgtaatctgtaa

SEQ ID NO: 2500 - DNA, 2213 bp, Adeno-associated virus 8
atggctgccgatggttatcttccagattggctcgaggacaacctctctgagggcattcgcgagtggtgggcgctgaaacctggagccccgaagcccaaagccaaccagcaaaagcaggacgacggccggggtctggtgcttcctggctacaagtacctcggacccttcaacggactcgacaagggggagcccgtcaacgcggcggacgcagcggccctcgagcacgacaaggcctacgaccagcagctgcaggcgggtgacaatccgtacctgcggtataaccacgccgacgccgagtttcaggagcgtctgcaagaagatacgtcttttgggggcaacctcgggcgagcagtcttccaggccaagaagcgggttctcgaacctctcggtctggttgaggaaggcgctaagacggctcctggaaagaagagaccggtagagccatcaccccagcgttctccagactcctctacgggcatcggcaagaaaggccaacagcccgccagaaaaagactcaattttggtcagactggcgactcagagtcagttccagaccctcaacctctcggagaacctccagcagcgccctctggtgtgggacctaatacaatggctgcaggcggtggcgcaccaatggcagacaataacgaaggcgccgacggagtgggtagttcctcgggaaattggcattgcgattccacatggctgggcgacagagtcatcaccaccagcacccgaacctgggccctgcccacctacaacaaccacctctacaagcaaatctccaacgggacatcgggaggagccaccaacgacaacacctacttcggctacagcaccccctgggggtattttgactttaacagattccactgccacttttcaccacgtgactggcagcgactcatcaacaacaactggggattccggcccaagagactcagcttcaagctcttcaacatccaggtcaaggaggtcacgcagaatgaaggcaccaagaccatcgccaataacctcaccagcaccatccaggtgtttacggactcggagtaccagctgccgtacgttctcggctctgcccaccagggctgcctgcctccgttcccggcggacgtgttcatgattccccagtacggctacctaacactcaacaacggtagtcaggccgtgggacgctcctccttctactgcctggaatactttccttcgcagatgctgagaaccggcaacaacttccagtttacttacaccttcgaggacgtgcctttccacagcagctacgcccacagccagagcttggaccggctgatgaatcctctgattgaccagtacctgtactacttgtctcggactcaaacaacaggaggcacggcaaatacgcagactctgggcttcagccaaggtgggcctaatacaatggccaatcaggcaaagaactggctgccaggaccctgttaccgccaacaacgcgtctcaacgacaaccgggcaaaacaacaatagcaactttgcctggactgctgggaccaaataccatctgaatggaagaaattcattggctaatcctggcatcgctatggcaacacacaaagacgacgaggagcgtttttttcccagtaacgggatcctgatttttggcaaacaaaatgctgccagagacaatgcggattacagcgatgtcatgctcaccagcgaggaagaaatcaaaaccactaaccctgtggctacagaggaatacggtatcgtggcagataacttgcagcagcaaaacacggctcctcaaattggaactgtcaacagccagggggccttacccggtatggtctggcagaaccgggacgtgtacctgcagggtcccatctgggccaagattcctcacacggacggcaacttccacccgtctccgctgatgggcggctttggcctgaaacatcctccgcctcagatcctgatcaagaacacgcctgtacctgcggatcctccgaccaccttcaaccagtcaaagctgaactctttcatcacgcaatacagcaccggacaggtcagcgtggaaattgaatgggagctgcagaaggaaaacagcaagcgctggaaccccgagatccagtacacctccaactactacaaatctacaagtgtggactttgctgtaatacagaaggcgtgtactctgaaccccgccccattggcacccgttacctcacccgtaatctg

SEQ ID NO: 2501 - DNA, 4393 bp, Adeno-associated virus 8
cagagagggagtggccaactccatcactaggggtagcgcgaagcgcctcccacgctgccgcgtcagcgctgacgtaaattacgtcataggggagtggtcctgtattagctgtcacgtgagtgcttttgcggcattttgcgacaccacgtggccatttgaggtatatatggccgagtgagcgagcaggatctccattttgaccgcgaaatttgaacgagcagcagccatgccgggcttctacgagatcgtgatcaaggtgccgagcgacctggacgagcacctgccgggcatttctgactcgtttgtgaactgggtggccgagaaggaatgggagctgcccccggattctgacatggatcggaatctgatcgagcaggcacccctgaccgtggccgagaagctgcagcgcgacttcctggtccaatggcgccgcgtgagtaaggccccggaggccctcttctttgttcagttcgagaagggcgagagctactttcacctgcacgttctggtcgagaccacgggggtcaagtccatggtgctaggccgcttcctgagtcagattcgggaaaagcttggtccagaccatctacccgcggggtcgagccccaccttgcccaactggttcgcggtgaccaaagacgcggtaatggcgccggcgggggggaacaaggtggtggacgagtgctacatccccaactacctcctgcccaagactcagcccgagctgcagtgggcgtggactaacatggaggagtatataagcgcgtgcttgaacctggccgagcgcaaacggctcgtggcgcagcacctgacccacgtcagccagacgcaggagcagaacaaggagaatctgaaccccaattctgacgcgcccgtgatcaggtcaaaaacctccgcgcgctatatggagctggtcgggtggctggtggaccggggcatcacctccgagaagcagtggatccaggaggaccaggcctcgtacatctccttcaacgccgcctccaactcgcggtcccagatcaaggccgcgctggacaatgccggcaagatcatggcgctgaccaaatccgcgcccgactacctggtggggccctcgctgcccgcggacattacccagaaccgcatctaccgcatcctcgctctcaacggctacgaccctgcctacgccggctccgtctttctcggctgggctcagaaaaagttcgggaaacgcaacaccatctggctgtttggacccgccaccaccggcaagaccaacattgcggaagccatcgcccacgccgtgcccttctacggctgcgtcaactggaccaatgagaactttcccttcaatgattgcgtcgacaagatggtgatctggtgggaggagggcaagatgacggccaaggtcgtggagtccgccaaggccattctcggcggcagcaaggtgcgcgtggaccaaaagtgcaagtcgtccgcccagatcgaccccacccccgtgatcgtcacctccaacaccaacatgtgcgccgtgattgacgggaacagcaccaccttcgagcaccagcagcctctccaggaccggatgtttaagttcgaactcacccgccgtctggagcacgactttggcaaggtgacaaagcaggaagtcaaagagttcttccgctgggccagtgatcacgtgaccgaggtggcgcatgagttttacgtcagaaagggcggagccagcaaaagacccgcccccgatgacgcggataaaagcgagcccaagcgggcctgcccctcagtcgcggatccatcgacgtcagacgcggaaggagctccggtggactttgccgacaggtaccaaaacaaatgttctcgtcacgcgggcatgcttcagatgctgtttccctgcaaaacgtgcgagagaatgaatcagaatttcaacatttgcttcacacacggggtcagagactgctcagagtgtttccccggcgtgtcagaatctcaaccggtcgtcagaaagaggacgtatcggaaactctgtgcgattcatcatctgctggggcgggctcccgagattgcttgctcggcctgcgatctggtcaacgtggacctggatgactgtgtttctgagcaataaatgacttaaaccaggtatggctgccgatggttatcttccagattggctcgaggacaacctctctgagggcattcgcgagtggtgggcgctgaaacctggagccccgaagcccaaagccaaccagcaaaagcaggacgacggccggggtctggtgcttcctggctacaagtacctcggacccttcaacggactcgacaagggggagcccgtcaacgcggcggacgcagcggccctcgagcacgacaaggcctacgaccagcagctgcaggcgggtgacaatccgtacctgcggtataaccacgccgacgccgagtttcaggagcgtctgcaagaagatacgtcttttgggggcaacctcgggcgagcagtcttccaggccaagaagcgggttctcgaacctctcggtctggttgaggaaggcgctaagacggctcctggaaagaagagaccggtagagccatcaccccagcgttctccagactcctctacgggcatcggcaagaaaggccaacagcccgccagaaaaagactcaattttggtcagactggcgactcagagtcagttccagaccctcaacctctcggagaacctccagcagcgccctctggtgtgggacctaatacaatggctgcaggcggtggcgcaccaatggcagacaataacgaaggcgccgacggagtgggtagttcctcgggaaattggcattgcgattccacatggctgggcgacagagtcatcaccaccagcacccgaacctgggccctgcccacctacaacaaccacctctacaagcaaatctccaacgggacatcgggaggagccaccaacgacaacacctacttcggctacagcaccccctgggggtattttgactttaacagattccactgccacttttcaccacgtgactggcagcgactcatcaacaacaactggggattccggcccaagagactcagcttcaagctcttcaacatccaggtcaaggaggtcacgcagaatgaaggcaccaagaccatcgccaataacctcaccagcaccatccaggtgtttacggactcggagtaccagctgccgtacgttctcggctctgcccaccagggctgcctgcctccgttcccggcggacgtgttcatgattccccagtacggctacctaacactcaacaacggtagtcaggccgtgggacgctcctccttctactgcctggaatactttccttcgcagatgctgagaaccggcaacaacttccagtttacttacaccttcgaggacgtgcctttccacagcagctacgcccacagccagagcttggaccggctgatgaatcctctgattgaccagtacctgtactacttgtctcggactcaaacaacaggaggcacggcaaatacgcagactctgggcttcagccaaggtgggcctaatacaatggccaatcaggcaaagaactggctgccaggaccctgttaccgccaacaacgcgtctcaacgacaaccgggcaaaacaacaatagcaactttgcctggactgctgggaccaaataccatctgaatggaagaaattcattggctaatcctggcatcgctatggcaacacacaaagacgacgaggagcgtttttttcccagtaacgggatcctgatttttggcaaacaaaatgctgccagagacaatgcggattacagcgatgtcatgctcaccagcgaggaagaaatcaaaaccactaaccctgtggctacagaggaatacggtatcgtggcagataacttgcagcagcaaaacacggctcctcaaattggaactgtcaacagccagggggccttacccggtatggtctggcagaaccgggacgtgtacctgcagggtcccatctgggccaagattcctcacacggacggcaacttccacccgtctccgctgatgggcggctttggcctgaaacatcctccgcctcagatcctgatcaagaacacgcctgtacctgcggatcctccgaccaccttcaaccagtcaaagctgaactctttcatcacgcaatacagcaccggacaggtcagcgtggaaattgaatgggagctgcagaaggaaaacagcaagcgctggaaccccgagatccagtacacctccaactactacaaatctacaagtgtggactttgctgttaatacagaaggcgtgtactctgaaccccgccccattggcacccgttacctcacccgtaatctgtaattgcctgttaatcaataaaccggttgattcgtttcagttgaactttggtctctgcg

SEQ ID NO: 2502 - protein, 738 aa, Adeno-associated virus 8; identical to SEQ ID NO: 2493

SEQ ID NO: 2503 - protein, 737 aa, Adeno-associated virus 8
MAADGYLPDWLEDNLSEGIREWWALKPGAPKPKANQQKQDDGRGLVLPGYKYLGPFNGLDKGEPVNAADAAALEHDKAYDQQLQAGDNPYLRYNHADAEFQERLQEDTSFGGNLGRAVFQAKKRVLEPLGLVEEGAKTAPGKKRPVEPSPQRSPDSSTGIGKKGQQPARKRLNFGQTGDSESVPDPQPLGEPPAAPSGVGPNTMAAGGGAPMADNNEGADGVGSSSGNWHCDSTWLGDRVITTSTRTWALPTYNNHLYKQISNGTSGGATNDNTYFGYSTPWGYFDFNRFHCHFSPRDWQRLINNNWGFRPKRLSFKLFNIQVKEVTQNEGTKTIANNLTSTIQVFTDSEYQLPYVLGSAHQGCLPPFPADVFMIPQYGYLTLNNGSQAVGRSSFYCLEYFPSQMLRTGNNFQFTYTFEDVPFHSSYAHSQSLDRLMNPLIDQYLYYLSRTQTTGGTANTQTLGFSQGGPNTMANQAKNWLPGPCYRQQRVSTTTGQNNNSNFAWTAGTKYHLNGRNSLANPGIAMATHKDDEERFFPSNGILIFGKQNAARDNADYSDVMLTSEEEIKTTNPVATEEYGIVADNLQQQNTAPQIGTVNSQGALPGMVWQNRDVYLQGPIWAKIPHTDGNFHPSPLMGGFGLKHPPPQILIKNTPVPADPPTTFNQSKLNSFITQYSTGQVSVEIEWELQKENSKRWNPEIQYTSNYYKSTSVDFAVIQKACTLNPAPLAPVTSPVI

SEQ ID NO: 2504 - DNA, 2217 bp, Artificial Sequence; identical to SEQ ID NO: 2499
  Synthetic polynucleotide

SEQ ID NO: 2505 - DNA, 2214 bp, Artificial Sequence
  Synthetic polynucleotide
atggctgccgatggttatcttccagattggctcgaggacaacctctctgagggcattcgcgagtggtgggcgctgaaacctggagccccgaagcccaaagccaaccagcaaaagcaggacgacggccggggtctggtgcttcctggctacaagtacctcggacccttcaacggactcgacaagggggagcccgtcaacgcggcggacgcagcggccctcgagcacgacaaggcctacgaccagcagctgcaggcgggtgacaatccgtacctgcggtataaccacgccgacgccgagtttcaggagcgtctgcaagaagatacgtcttttgggggcaacctcgggcgagcagtcttccaggccaagaagcgggttctcgaacctctcggtctggttgaggaaggcgctaagacggctcctggaaagaagagaccggtagagccatcaccccagcgttctccagactcctctacgggcatcggcaagaaaggccaacagcccgccagaaaaagactcaattttggtcagactggcgactcagagtcagttccagaccctcaacctctcggagaacctccagcagcgccctctggtgtgggacctaatacaatggctgcaggcggtggcgcaccaatggcagacaataacgaaggcgccgacggagtgggtagttcctcgggaaattggcattgcgattccacatggctgggcgacagagtcatcaccaccagcacccgaacctgggccctgcccacctacaacaaccacctctacaagcaaatctccaacgggacatcgggaggagccaccaacgacaacacctacttcggctacagcaccccctgggggtattttgactttaacagattccactgccacttttcaccacgtgactggcagcgactcatcaacaacaactggggattccggcccaagagactcagcttcaagctcttcaacatccaggtcaaggaggtcacgcagaatgaaggcaccaagaccatcgccaataacctcaccagcaccatccaggtgtttacggactcggagtaccagctgccgtacgttctcggctctgcccaccagggctgcctgcctccgttcccggcggacgtgttcatgattccccagtacggctacctaacactcaacaacggtagtcaggccgtgggacgctcctccttctactgcctggaatactttccttcgcagatgctgagaaccggcaacaacttccagtttacttacaccttcgaggacgtgcctttccacagcagctacgcccacagccagagcttggaccggctgatgaatcctctgattgaccagtacctgtactacttgtctcggactcaaacaacaggaggcacggcaaatacgcagactctgggcttcagccaaggtgggcctaatacaatggccaatcaggcaaagaactggctgccaggaccctgttaccgccaacaacgcgtctcaacgacaaccgggcaaaacaacaatagcaactttgcctggactgctgggaccaaataccatctgaatggaagaaattcattggctaatcctggcatcgctatggcaacacacaaagacgacgaggagcgtttttttcccagtaacgggatcctgatttttggcaaacaaaatgctgccagagacaatgcggattacagcgatgtcatgctcaccagcgaggaagaaatcaaaaccactaaccctgtggctacagaggaatacggtatcgtggcagataacttgcctgagcggacggcgatgagtcttccgggaactgtcaacagccagggggccttacccggtatggtctggcagaaccgggacgtgtacctgcagggtcccatctgggccaagattcctcacacggacggcaacttccacccgtctccgctgatgggcggctttggcctgaaacatcctccgcctcagatcctgatcaagaacacgcctgtacctgcggatcctccgaccaccttcaaccagtcaaagctgaactctttcatcacgcaatacagcaccggacaggtcagcgtggaaattgaatgggagctgcagaaggaaaacagcaagcgctggaaccccgagatccagtacacctccaactactacaaatctacaagtgtggactttgctgttaatacagaaggcgtgtactctgaaccccgccccattggcacccgttacctcacccgtaatctg

SEQ ID NO: 2506 - protein, 738 aa, Artificial Sequence
  Synthetic polypeptide
MAADGYLPDWLEDNLSEGIREWWALKPGAPKPKANQQKQDDGRGLVLPGYKYLGPFNGLDKGEPVNAADAAALEHDKAYDQQLQAGDNPYLRYNHADAEFQERLQEDTSFGGNLGRAVFQAKKRVLEPLGLVEEGAKTAPGKKRPVEPSPQRSPDSSTGIGKKGQQPARKRLNFGQTGDSESVPDPQPLGEPPAAPSGVGPNTMAAGGGAPMADNNEGADGVGSSSGNWHCDSTWLGDRVITTSTRTWALPTYNNHLYKQISNGTSGGATNDNTYFGYSTPWGYFDFNRFHCHFSPRDWQRLINNNWGFRPKRLSFKLFNIQVKEVTQNEGTKTIANNLTSTIQVFTDSEYQLPYVLGSAHQGCLPPFPADVFMIPQYGYLTLNNGSQAVGRSSFYCLEYFPSQMLRTGNNFQFTYTFEDVPFHSSYAHSQSLDRLMNPLIDQYLYYLSRTQTTGGTANTQTLGFSQGGPNTMANQAKNWLPGPCYRQQRVSTTTGQNNNSNFAWTAGTKYHLNGRNSLANPGIAMATHKDDEERFFPSNGILIFGKQNAARDNADYSDVMLTSEEEIKTTNPVATEEYGIVADNLPERTAMSLPGTVNSQGALPGMVWQNRDVYLQGPIWAKIPHTDGNFHPSPLMGGFGLKHPPPQILIKNTPVPADPPTTFNQSKLNSFITQYSTGQVSVEIEWELQKENSKRWNPEIQYTSNYYKSTSVDFAVNTEGVYSEPRPIGTRYLTRNL

SEQ ID NO: 2507 - DNA, 2214 bp, Artificial Sequence
  Synthetic polynucleotide
atggctgccgatggttatcttccagattggctcgaggacaacctctctgagggcattcgcgagtggtgggcgctgaaacctggagccccgaagcccaaagccaaccagcaaaagcaggacgacggccggggtctggtgcttcctggctacaagtacctcggacccttcaacggactcgacaagggggagcccgtcaacgcggcggacgcagcggccctcgagcacgacaaggcctacgaccagcagctgcaggcgggtgacaatccgtacctgcggtataaccacgccgacgccgagtttcaggagcgtctgcaagaagatacgtcttttgggggcaacctcgggcgagcagtcttccaggccaagaagcgggttctcgaacctctcggtctggttgaggaaggcgctaagacggctcctggaaagaagagaccggtagagccatcaccccagcgttctccagactcctctacgggcatcggcaagaaaggccaacagcccgccagaaaaagactcaattttggtcagactggcgactcagagtcagttccagaccctcaacctctcggagaacctccagcagcgccctctggtgtgggacctaatacaatggctgcaggcggtggcgcaccaatggcagacaataacgaaggcgccgacggagtgggtagttcctcgggaaattggcattgcgattccacatggctgggcgacagagtcatcaccaccagcacccgaacctgggccctgcccacctacaacaaccacctctacaagcaaatctccaacgggacatcgggaggagccaccaacgacaacacctacttcggctacagcaccccctgggggtattttgactttaacagattccactgccacttttcaccacgtgactggcagcgactcatcaacaacaactggggattccggcccaagagactcagcttcaagctcttcaacatccaggtcaaggaggtcacgcagaatgaaggcaccaagaccatcgccaataacctcaccagcaccatccaggtgtttacggactcggagtaccagctgccgtacgttctcggctctgcccaccagggctgcctgcctccgttcccggcggacgtgttcatgattccccagtacggctacctaacactcaacaacggtagtcaggccgtgggacgctcctccttctactgcctggaatactttccttcgcagatgctgagaaccggcaacaacttccagtttacttacaccttcgaggacgtgcctttccacagcagctacgcccacagccagagcttggaccggctgatgaatcctctgattgaccagtacctgtactacttgtctcggactcaaacaacaggaggcacggcaaatacgcagactctgggcttcagccaaggtgggcctaatacaatggccaatcaggcaaagaactggctgccaggaccctgttaccgccaacaacgcgtctcaacgacaaccgggcaaaacaacaatagcaactttgcctggactgctgggaccaaataccatctgaatggaagaaattcattggctaatcctggcatcgctatggcaacacacaaagacgacgaggagcgtttttttcccagtaacgggatcctgatttttggcaaacaaaatgctgccagagacaatgcggattacagcgatgtcatgctcaccagcgaggaagaaatcaaaaccactaaccctgtggctacagaggaatacggtatcgtggcagataacttgagttttagtcgtgcggttctttgtgatggaactgtcaacagccagggggccttacccggtatggtctggcagaaccgggacgtgtacctgcagggtcccatctgggccaagattcctcacacggacggcaacttccacccgtctccgctgatgggcggctttggcctgaaacatcctccgcctcagatcctgatcaagaacacgcctgtacctgcggatcctccgaccaccttcaaccagtcaaagctgaactctttcatcacgcaatacagcaccggacaggtcagcgtggaaattgaatgggagctgcagaaggaaaacagcaagcgctggaaccccgagatccagtacacctccaactactacaaatctacaagtgtggactttgctgttaatacagaaggcgtgtactctgaaccccgccccattggcacccgttacctcacccgtaatctg

SEQ ID NO: 2508 - protein, 738 aa, Artificial Sequence
  Synthetic polypeptide
MAADGYLPDWLEDNLSEGIREWWALKPGAPKPKANQQKQDDGRGLVLPGYKYLGPFNGLDKGEPVNAADAAALEHDKAYDQQLQAGDNPYLRYNHADAEFQERLQEDTSFGGNLGRAVFQAKKRVLEPLGLVEEGAKTAPGKKRPVEPSPQRSPDSSTGIGKKGQQPARKRLNFGQTGDSESVPDPQPLGEPPAAPSGVGPNTMAAGGGAPMADNNEGADGVGSSSGNWHCDSTWLGDRVITTSTRTWALPTYNNHLYKQISNGTSGGATNDNTYFGYSTPWGYFDFNRFHCHFSPRDWQRLINNNWGFRPKRLSFKLFNIQVKEVTQNEGTKTIANNLTSTIQVFTDSEYQLPYVLGSAHQGCLPPFPADVFMIPQYGYLTLNNGSQAVGRSSFYCLEYFPSQMLRTGNNFQFTYTFEDVPFHSSYAHSQSLDRLMNPLIDQYLYYLSRTQTTGGTANTQTLGFSQGGPNTMANQAKNWLPGPCYRQQRVSTTTGQNNNSNFAWTAGTKYHLNGRNSLANPGIAMATHKDDEERFFPSNGILIFGKQNAARDNADYSDVMLTSEEEIKTTNPVATEEYGIVADNLSFSRAVLCDGTVNSQGALPGMVWQNRDVYLQGPIWAKIPHTDGNFHPSPLMGGFGLKHPPPQILIKNTPVPADPPTTFNQSKLNSFITQYSTGQVSVEIEWELQKENSKRWNPEIQYTSNYYKSTSVDFAVNTEGVYSEPRPIGTRYLTRNL

SEQ ID NO: 2509 - DNA, 4385 bp, Adeno-associated virus 9
cagagagggagtggccaactccatcactaggggtaatcgcgaagcgcctcccacgctgccgcgtcagcgctgacgtagattacgtcataggggagtggtcctgtattagctgtcacgtgagtgcttttgcgacattttgcgacaccacatggccatttgaggtatatatggccgagtgagcgagcaggatctccattttgaccgcgaaatttgaacgagcagcagccatgccgggcttctacgagattgtgatcaaggtgccgagcgacctggacgagcacctgccgggcatttctgactcttttgtgaactgggtggccgagaaggaatgggagctgcccccggattctgacatggatcggaatctgatcgagcaggcacccctgaccgtggccgagaagctgcagcgcgacttcctggtccaatggcgccgcgtgagtaaggccccggaggccctcttctttgttcagttcgagaagggcgagagctactttcacctgcacgttctggtcgagaccacgggggtcaagtccatggtgctaggccgcttcctgagtcagattcgggagaagctggtccagaccatctaccgcgggatcgagccgaccctgcccaactggttcgcggtgaccaagacgcgtaatggcgccggcggggggaacaaggtggtggacgagtgctacatccccaactacctcctgcccaagactcagcccgagctgcagtgggcgtggactaacatggaggagtatataagcgcgtgcttgaacctggccgagcgcaaacggctcgtggcgcagcacctgacccacgtcagccagacgcaggagcagaacaaggagaatctgaaccccaattctgacgcgcccgtgatcaggtcaaaaacctccgcgcgctacatggagctggtcgggtggctggtggaccggggcatcacctccgagaagcagtggatccaggaggaccaggcctcgtacatctccttcaacgccgcctccaactcgcggtcccagatcaaggccgcgctggacaatgccggcaagatcatggcgctgaccaaatccgcgcccgactacctggtaggcccttcacttccggtggacattacgcagaaccgcatctaccgcatcctgcagctcaacggctacgaccctgcctacgccggctccgtctttctcggctgggcacaaaagaagttcgggaaacgcaacaccatctggctgtttgggccggccaccacgggaaagaccaacatcgcagaagccattgcccacgccgtgcccttctacggctgcgtcaactggaccaatgagaactttcccttcaacgattgcgtcgacaagatggtgatctggtgggaggagggcaagatgacggccaaggtcgtggagtccgccaaggccattctcggcggcagcaaggtgcgcgtggaccaaaagtgcaagtcgtccgcccagatcgaccccactcccgtgatcgtcacctccaacaccaacatgtgcgccgtgattgacgggaacagcaccaccttcgagcaccagcagcctctccaggaccggatgtttaagttcgaactcacccgccgtctggagcacgactttggcaaggtgacaaagcaggaagtcaaagagttcttccgctgggccagtgatcacgtgaccgaggtggcgcatgagttttacgtcagaaagggcggagccagcaaaagacccgcccccgatgacgcggataaaagcgagcccaagcgggcctgcccctcagtcgcggatccatcgacgtcagacgcggaaggagctccggtggactttgccgacaggtaccaaaacaaatgttctcgtcacgcgggcatgcttcagatgctgcttccctgcaaaacgtgcgagagaatgaatcagaatttcaacatttgcttcacacacggggtcagagactgctcagagtgtttccccggcgtgtcagaatctcaaccggtcgtcagaaagaggacgtatcggaaactctgtgcgattcatcatctgctggggcgggctcccgagattgcttgctcggcctgcgatctggtcaacgtggacctggatgactgtgtttctgagcaataaatgacttaaaccaggtatggctgccgatggttatcttccagattggctcgaggacaacctctctgagggcattcgcgagtggtgggcgctgaaacctggagccccgaagcccaaagccaaccagcaaaagcaggacgacggccggggtctggtgcttcctggctacaagtacctcggacccttcaacggactcgacaagggggagcccgtcaacgcggcggacgcagcggccctcgagcacggcaaggcctacgaccagcagctgcaggcgggtgacaatccgtacctgcggtataaccacgccgacgccgagtttcaggagcgtctgcaagaagatacgtcttttgggggcaacctcgggcgagcagtcttccaggccaagaagcgggttctcgaacctctcggtctggttgaggaaggcgctaagacggctcctggaaagaagagaccggtagagccatcaccccagcgttctccagactcctctacgggcatcggcaagaaaggccaacagcccgccagaaaaagactcaattttggtcagactggcgactcagagtcagttccagaccctcaacctctcggagaacctccagcagcgccctctggtgtgggacctaatacaatggctgcaggcggtggcgcaccaatggcagacaataacgaaggcgccgacggagtgggtaattcctcgggaaattggcattgcgattccacatggctgggggacagagtcatcaccaccagcacccgaacctgggcattgcccacctacaacaaccacctctacaagcaaatctccaatggaacatcgggaggaagcaccaacgacaacacctactttggctacagcaccccctgggggtattttgacttcaacagattccactgccacttctcaccacgtgactggcagcgactcatcaacaacaactggggattccggccaaagagactcaacttcaagctgttcaacatccaggtcaaggaggttacgacgaacgaaggcaccaagaccatcgccaataaccttaccagcaccgtccaggtctttacggactcggagtaccagctaccgtacgtcctaggctctgcccaccaaggatgcctgccaccgtttcctgcagacgtcttcatggttcctcagtacggctacctgacgctcaacaatggaagtcaagcgttaggacgttcttctttctactgtctggaatacttcccttctcagatgctgagaaccggcaacaactttcagttcagctacactttcgaggacgtgcctttccacagcagctacgcacacagccagagtctagatcgactgatgaaccccctcatcgaccagtacctatactacctggtcagaacacagacaactggaactgggggaactcaaactttggcattcagccaagcaggccctagctcaatggccaatcaggctagaaactgggtacccgggccttgctaccgtcagcagcgcgtctccacaaccaccaaccaaaataacaacagcaactttgcgtggacgggagctgctaaattcaagctgaacgggagagactcgctaatgaatcctggcgtggctatggcatcgcacaaagacgacgaggaccgcttctttccatcaagtggcgttctcatatttggcaagcaaggagccgggaacgatggagtcgactacagccaggtgctgattacagatgaggaagaaattaaagccaccaaccctgtagccacagaggaatacggagcagtggccatcaacaaccaggccgctaacacgcaggcgcaaactggacttgtgcataaccagggagttattcctggtatggtctggcagaaccgggacgtgtacctgcagggccctatttgggctaaaatacctcacacagatggcaactttcacccgtctcctctgatgggtggatttggactgaaacacccacctccacagattctaattaaaaatacaccagtgccggcagatcctcctcttaccttcaatcaagccaagctgaactctttcatcacgcagtacagcacgggacaagtcagcgtggaaatcgagtgggagctgcagaaagaaaacagcaagcgctggaatccagagatccagtatacttcaaactactacaaatctacaaatgtggactttgctgtcaataccaaaggtgtttactctgagcctcgccccattggtactcgttacctcacccgtaatttgtaattgcctgttaatcaataaaccggttaattcgtttcagttgaactttggtctctgcg

SEQ ID NO: 2510 - DNA, 4382 bp, Adeno-associated virus 9
cagagagggagtggccaactccatcactaggggtaatcgcgaagcgcctcccacgctgccgcgtcagcgctgacgtagattacgtcataggggagtggtcctgtattagctgtcacgtgagtgcttttgcgacattttgcgacaccacatggccatttgaggtatatatggccgagtgagcgagcaggatctccattttgaccgcgaaatttgaacgagcagcagccatgccgggcttctacgagattgtgatcaaggtgccgagcgacctggacgagcacctgccgggcatttctgactcttttgtgaactgggtggccgagaaggaatgggagctgcccccggattctgacatggatcggaatctgatcgagcaggcacccctgaccgtggccgagaagctgtagcgcgacttcctggtccaatggcgccgcgtgagtaaggccccggaggccctcttctttgttcagttcgagaagggcgagagctactttcacctgcacgttctggtcgagaccacgggggtcaagtccatggtgctaggccgcttcctgagtcagattcgggagaagctggtccagaccatctaccgcgggatcgagccgaccctgcccaactggttcgcggtgaccaagacgcgtaatggcgccggcggggggaacaaggtggtggacgagtgctacatccccaactacctcctgcccaagactcagcccgagctgcagtgggcgtggactaacatggaggagtatataagcgcgtgcttgaacctggccgagcgcaaacggctcgtggcgcagcacctgacccacgtcagccagacgcaggagcagaacaaggagaatctgaaccccaattctgacgcgcccgtgatcaggtcaaaaacctccgcgcgctacatggagctggtcgggtggctggtggaccggggcatcacctccgagaagcagtggatccaggaggaccaggcctcgtacatctccttcaacgccgcctccaactcgcggtcccagatcaaggccgcgctggacaatgccggcaagatcatggcgctgaccaaatccgcgcccgactacctggtaggcccttcacttccggtggacattacgcagaaccgcatctaccgcatcctgcagctcaacggctacgaccctgcctacgccggctccgtctttctcggctgggcacaaaagaagttcgggaaacgcaacaccatctggctgtttgggccggccaccacgggaaagaccaacatcgcagaagccattgcccacgccgtgcccttctacggctgcgtcaactggaccaatgagaactttcccttcaacgattgcgtcgacaagatggtgatctggtgggaggagggcaagatgacggccaaggtcgtggagtccgccaaggccattctcggcggcagcaaggtgcgcgtggaccaaaagtgcaagtcgtccgcccagatcgaccccactcccgtgatcgtcacctccaacaccaacatgtgcgccgtgattgacgggaacagcaccaccttcgagcaccagcagcctctccaggaccggatgtttaagttcgaactcacccgccgtctggagcacgactttggcaaggtgacaaagcaggaagtcaaagagttcttccgctgggccagtgatcacgtgaccgaggtggcgcatgagttttacgtcagaaagggcggagccagcaaaagacccgcccccgatgacgcggataaaagcgagcccaagcgggcctgcccctcagtcgcggatccatcgacgtcagacgcggaaggagctccggtggactttgccgacaggtaccaaaacaaatgttctcgtcacgcgggcatgcttcagatgctgcttccctgcaaaacgtgcgagagaatgaatcagaatttcaacatttgcttcacacacggggtcagagactgctcagagtgtttccccggcgtgtcagaatctcaaccggtcgtcagaaagaggacgtatcggaaactctgtgcgattcatcatctgctggggcgggctcccgagattgcttgctcggcctgcgatctggtcaacgtggacctggatgactgtgtttctgagcaataaatgacttaaaccaggtatggctgccgatggttatcttccagattggctcgaggacaacctctctgagggcattcgcgagtggtgggacctgaaacctggagccccgaaacccaaagccaaccagcaaaagcaggacgacggccggggtctggtgcttcctggctacaagtacctcggacccttcaacggactcgacaagggggagcccgtcaacgcggcggacgcagcggccctcgagcacgacaaggcctacgaccagcagctcaaagcgggtgacaatccgtacctgcggtataaccacgccgacgccgagtttcaggagcgtctgcaagaagatacgtcttttgggggcaacctcgggcgagcagtcttccaggccaagaagcgggttctcgaacctctcggtctggttgaggaaggcgctaagacggctcctggaaagaagagaccggtagagcagtcaccccaagaaccagactcatcctcgggcatcggcaaatcaggccagcagcccgctaaaaagagactcaattttggtcagactggcgactcagagtcagtccccgacccacaacctctcggagaacctccagaagccccctcaggtctgggacctaatacaatggcttcaggcggtggcgctccaatggcagacaataacgaaggcgccgacggagtgggtaattcctcgggaaattggcattgcgattccacatggctgggggacagagtcatcaccaccagcacccgaacctgggcattgcccacctacaacaaccacctctacaagcaaatctccaatggaacatcgggaggaagcaccaacgacaacacctactttggctacagcaccccctgggggtattttgacttcaacagattccactgccacttctcaccacgtgactggcagcgactcatcaacaacaactggggattccggccaaagagactcaacttcaagctgttcaacatccaggtcaaggaggttacgacgaacgaaggcaccaagaccatcgccaataaccttaccagcaccgtccaggtctttacggactcggagtaccagctaccgtacgtcctaggctctgcccaccaaggatgcctgccaccgtttcctgcagacgtcttcatggttcctcagtacggctacctgacgctcaacaatggaagtcaagcgttaggacgttcttctttctactgtctggaatacttcccttctcagatgctgagaaccggcaacaactttcagttcagctacactttcgaggacgtgcctttccacagcagctacgcacacagccagagtctagatcgactgatgaaccccctcatcgaccagtacctatactacctggtcagaacacagacaactggaactgggggaactcaaactttggcattcagccaagcaggccctagctcaatggccaatcaggctagaaactgggtacccgggccttgctaccgtcagcagcgcgtctccacaaccaccaaccaaaataacaacagcaactttgcgtggacgggagctgctaaattcaagctgaacgggagagactcgctaatgaatcctggcgtggctatggcatcgcacaaagacgacgaggaccgcttctttccatcaagtggcgttctcatatttggcaagcaaggagccgggaacgatggagtcgactacagccaggtgctgattacagatgaggaagaaattaaagccaccaaccctgtagccacagaggaatacggagcagtggccatcaacaaccaggccgctaacacgcaggcgcaaactggacttgtgcataaccagggagttattcctggtatggtctggcagaaccgggacgtgtacctgcagggccctatttgggctaaaatacctcacacagatggcaactttcacccgtctcctctgatgggtggatttggactgaaacacccacctccacagattctaattaaaaatacaccagtgccggcagatcctcctcttaccttcaatcaagccaagctgaactctttcatcacgcagtacagcacgggacaagtcagcgtggaaatcgagtgggagctgcagaaagaaaacagcaagcgctggaatccagagatccagtatacttcaaactactacaaatctacaaatgtggactttgctgtcaataccgaaggtgtttactctgagcctcgccccattggtactcgttacctcacccgtaatttgtaattgcctgttaatcaataaaccggttaattcgtttcagttgaactttggtctctgcg

SEQ ID NO: 2511 - protein, 736 aa, Adeno-associated virus 9
MAADGYLPDWLEDNLSEGIREWWALKPGAPQPKANQQHQDNARGLVLPGYKYLGPGNGLDKGEPVNAADAAALEHDKAYDQQLKAGDNPYLKYNHADAEFQERLKEDTSFGGNLGRAVFQAKKRLLEPLGLVEEAAKTAPGKKRPVEQSPQEPDSSAGIGKSGAQPAKKRLNFGQTGDTESVPDPQPIGEPPAAPSGVGSLTMASGGGAPVADNNEGADGVGSSSGNWHCDSQWLGDRVITTSTRTWALPTYNNHLYKQISNSTSGGSSNDNAYFGYSTPWGYFDFNRFHCHFSPRDWQRLINNNWGFRPKRLNFKLFNIQVKEVTDNNGVKTIANNLTSTVQVFTDSDYQLPYVLGSAHEGCLPPFPADVFMIPQYGYLTLNDGSQAVGRSSFYCLEYFPSQMLRTGNNFQFSYEFENVPFHSSYAHSQSLDRLMNPLIDQYLYYLSKTINGSGQNQQTLKFSVAGPSNMAVQGRNYIPGPSYRQQRVSTTVTQNNNSEFAWPGASSWALNGRNSLMNPGPAMASHKEGEDRFFPLSGSLIFGKQGTGRDNVDADKVMITNEEEIKTTNPVATESYGQVATNHQSAQAQAQTGWVQNQGILPGMVWQDRDVYLQGPIWAKIPHTDGNFHPSPLMGGFGMKHPPPQILIKNTPVPADPPTAFNKDKLNSFITQYSTGQVSVEIEWELQKENSKRWNPEIQYTSNYYKSNNVEFAVNTEGVYSEPRPIGTRYLTRNL

SEQ ID NO: 2512 - protein, 736 aa, Adeno-associated virus 9
MAADGYLPDWLEDNLSEGIREWWDLKPGAPKPKANQQKQDDGRGLVLPGYKYLGPFNGLDKGEPVNAADAAALEHDKAYDQQLKAGDNPYLRYNHADAEFQERLQEDTSFGGNLGRAVFQAKKRVLEPLGLVEEGAKTAPGKKRPVEQSPQEPDSSSGIGKSGQQPAKKRLNFGQTGDSESVPDPQPLGEPPEAPSGLGPNTMASGGGAPMADNNEGADGVGNSSGNWHCDSTWLGDRVITTSTRTWALPTYNNHLYKQISNGTSGGSTNDNTYFGYSTPWGYFDFNRFHCHFSPRDWQRLINNNWGFRPKRLNFKLFNIQVKEVTTNEGTKTIANNLTSTVQVFTDSEYQLPYVLGSAHQGCLPPFPADVFMVPQYGYLTLNNGSQALGRSSFYCLEYFPSQMLRTGNNFQFSYTFEDVPFHSSYAHSQSLDRLMNPLIDQYLYYLVRTQTTGTGGTQTLAFSQAGPSSMANQARNWVPGPCYRQQRVSTTTNQNNNSNFAWTGAAKFKLNGRDSLMNPGVAMASHKDDEDRFFPSSGVLIFGKQGAGNDGVDYSQVLITDEEEIKATNPVATEEYGAVAINNQAANTQAQTGLVHNQGVIPGMVWQNRDVYLQGPIWAKIPHTDGNFHPSPLMGGFGLKHPPPQILIKNTPVPADPPLTFNQAKLNSFITQYSTGQVSVEIEWELQKENSKRWNPEIQYTSNYYKSTNVDFAVNTEGVYSEPRPIGTRYLTRNL

SEQ ID NO: 2513 - protein, 623 aa, Adeno-associated virus 9
MPGFYEIVIKVPSDLDEHLPGISDSFVNWVAEKEWELPPDSDMDRNLIEQAPLTVAEKLQRDFLVQWRRVSKAPEALFFVQFEKGESYFHLHVLVETTGVKSMVLGRFLSQIREKLVQTIYRGIEPTLPNWFAVTKTRNGAGGGNKVVDECYIPNYLLPKTQPELQWAWTNMEEYISACLNLAERKRLVAQHLTHVSQTQEQNKENLNPNSDAPVIRSKTSARYMELVGWLVDRGITSEKQWIQEDQASYISFNAASNSRSQIKAALDNAGKIMALTKSAPDYLVGPSLPVDITQNRIYRILQLNGYDPAYAGSVFLGWAQKKFGKRNTIWLFGPATTGKTNIAEAIAHAVPFYGCVNWTNENFPFNDCVDKMVIWWEEGKMTAKVVESAKAILGGSKVRVDQKCKSSAQIDPTPVIVTSNTNMCAVIDGNSTTFEHQQPLQDRMFKFELTRRLEHDFGKVTKQEVKEFFRWASDHVTEVAHEFYVRKGGASKRPAPDDADKSEPKRACPSVADPSTSDAEGAPVDFADRYQNKCSRHAGMLQMLLPCKTCERMNQNFNICFTHGVRDCSECFPGVSESQPVVRKRTYRKLCAIHHLLGRAPEIACSACDLVNVDLDDCVSEQ

SEQ ID NO: 2514 - DNA, 2211 bp, Artificial Sequence
  Synthetic polynucleotide
atggctgccgatggttatcttccagattggctcgaggacaaccttagtgaaggaattcgcgagtggtgggctttgaaacctggagcccctcaacccaaggcaaatcaacaacatcaagacaacgctcgaggtcttgtgcttccgggttacaaataccttggacccggcaacggactcgacaagggggagccggtcaacgcagcagacgcggcggccctcgagcacgacaaggcctacgaccagcagctcaaggccggagacaacccgtacctcaagtacaaccacgccgacgccgagttccaggagcggctcaaagaagatacgtcttttgggggcaacctcgggcgagcagtcttccaggccaaaaagaggcttcttgaacctcttggtctggttgaggaagcggctaagacggctcctggaaagaagaggcctgtagagcagtctcctcaggaaccggactcctccgcgggtattggcaaatcgggtgcacagcccgctaaaaagagactcaatttcggtcagactggcgacacagagtcagtcccagaccctcaaccaatcggagaacctcccgcagccccctcaggtgtgggatctcttacaatggcttcaggtggtggcgcaccagtggcagacaataacgaaggtgccgatggagtgggtagttcctcgggaaattggcattgcgattcccaatggctgggggacagagtcatcaccaccagcacccgaacctgggccctgcccacctacaacaatcacctctacaagcaaatctccaacagcacatctggaggatcttcaaatgacaacgcctacttcggctacagcaccccctgggggtattttgacttcaacagattccactgccacttctcaccacgtgactggcagcgactcatcaacaacaactggggattccggcctaagcgactcaacttcaagctcttcaacattcaggtcaaagaggttacggacaacaatggagtcaagaccatcgccaataaccttaccagcacggtccaggtcttcacggactcagactatcagctcccgtacgtgctcgggtcggctcacgagggctgcctcccgccgttcccagcggacgttttcatgattcctcagtacgggtatctgacgcttaatgatggaagccaggccgtgggtcgttcgtccttttactgcctggaatatttcccgtcgcaaatgctaagaacgggtaacaacttccagttcagctacgagtttgagaacgtacctttccatagcagctacgctcacagccaaagcctggaccgactaatgaatccactcatcgaccaatacttgtactatctctcaaagactattaacggttctggacagaatcaacaaacgctaaaattcagtgtggccggacccagcaacatggctgtccagggaagaaactacatacctggacccagctaccgacaacaacgtgtctcaaccactgtgactcaaaacaacaacagcgaatttgcttggcctggagcttcttcttgggctctcaatggacgtaatagcttgatgaatcctggacctgctatggccagccacaaagaaggagaggaccgtttctttcctttgtctggatctttaatttttggcaaacaaggaactggaagagacaacgtggatgcggacaaagtcatgataaccaacgaagaagaaattaaaactactaacccggtagcaacggagtcctatggacaagtggccacaaaccaccagagtgcccaagcacaggcgcagaccggctgggttcaaaaccaaggaatacttccgggtatggtttggcaggacagagatgtgtacctgcaaggacccatttgggccaaaattcctcacacggacggcaactttcacccttctccgctgatgggagggtttggaatgaagcacccgcctcctcagatcctcatcaaaaacacacctgtacctgcggatcctccaacggccttcaacaaggacaagctgaactctttcatcacccagtattctactggccaagtcagcgtggagatcgagtgggagctgcagaaggaaaacagcaagcgctggaacccggagatccagtacacttccaactattacaagtctaataatgttgaatttgctgttaatactgaaggtgtatatagtgaaccccgccccattggcaccagatacctgactcgtaatctgtaa

SEQ ID NO: 2515 - protein, 736 aa, Artificial Sequence; identical to SEQ ID NO: 2511
  Synthetic polypeptide

SEQ ID NO: 2516 - DNA, 2460 bp, Artificial Sequence
  Synthetic polynucleotide
ggtaattcctccggaaattggcattgcgattccacatggctgggcgaccgagtcattaccaccagcacccggacttgggccctgcccacctacaacaaccacctctacaagcaaatctccagccaatcgggtgccaccaacgacaaccactacttcggctacagcaccccttgggggtattttgatttcaacagattccactgccatttctcaccacgtgactggcagcgactcatcaacaacaactggggattcatggctgccgatggttatcttccagattggctcgaggacactctctctgaaggaatcagacagtggtggaagctcaaacctggcccaccaccgccgaaacctaaccaacaacaccgggacgacagtaggggtcttgtgcttcctgggtacaagtacctcggacccttcaacggactcgacaaaggagagccggtcaacgaggcagacgccgcggccctcgagcacgacaaagcctacgaccaccagctcaagcaaggggacaacccgtacctcaaatacaaccacgcggacgctgaatttcaggagcgtcttcaagaagatacgtctttcgggggcaacctcgggcgagcagtcttccaggccaaaaagagggtactcgagcctcttggtctggttgaggaagctgttaagacggctcctggaaaaaagagacctatagagcagtctcctgcagaaccggactcttcctcgggcatcggcaaatcaggccagcagcccgctaagaaaagactcaattttggtcagactggcgacacagagtcagtcccagaccctcaaccaatcggagaaccccccgcagccccctctggtgtgggatctaatacaatggcttcaggcggtggggcaccaatggcagacaataacgaaggcgccgacggagtgggtaattcctcgggaaattggcattgcgattccacatggatgggcgacagagttatcaccaccagcacaagaacctgggccctccccacctacaataatcacctctacaagcaaatctccagcgaatcgggagccaccaacgacaaccactacttcggctacagcaccccctgggggtattttgactttaacagattccactgtcacttctcaccacgtgactggcagcgactcatcaacaacaactggggatttagacccaagaaactcaatttcaagctcttcaacatccaagtcaaggaggtcacgcagaatgatggaaccacgaccatcgccaataaccttaccagcacggtgcaggtcttcacagactctgagtaccagctgccctacgtcctcggttcggctcaccagggctgccttccgccgttcccagcagacgtcttcatgattcctcagtacggctacttgactctgaacaatggcagccaagcggtaggacgttcttcattctactgtctagagtattttccctctcagatgctgaggacgggaaacaacttcaccttcagctacacttttgaagacgtgcctttccacagcagctacgcgcacagccagagtctggatcggctgatgaatcctctcattgaccagtacctgtattacctgagcaaaactcagggtacaagtggaacaacgcagcaatcgagactgcagttcagccaagctgggcctagctccatggctcagcaggccaaaaactggctaccgggacccagctaccgacagcagcgaatgtctaagacggctaatgacaacaacaacagtgaatttgcttggactgcagccaccaaatattacctgaatggaagaaattctctggtcaatcccgggcccccaatggccagtcacaaggacgatgaggaaaagtatttccccatgcacggaaatctcatctttggaaaacaaggcacaggaactaccaatgtggacattgaatcagtgcttattacagacgaagaagaaatcagaacaactaatcctgtggctacagaacaatacggacaggttgccaccaaccatcagagtcagaacaccacagcttcctatggaagtgtggacagccagggaatcttacctggaatggtgtggcaggaccgcgatgtctatcttcaaggtcccatttgggccaaaactcctcacacggacggacactttcatccttctccgctcatgggaggctttggactgaaacaccctcctccccagatcctgatcaaaaacacacctgtgccagcgaatcccgcgaccactttcactcctggaaagtttgcttcgttcattacccagtattccaccggacaggtcagcgtggaaatagagtgggagctgcagaaagaaaacagcaaacgctggaacccagaaattcagtacacctccaactacaacaagtcggtgaatgtggagtttaccgtggacgcaaacggtgtttattctgaaccccgccctattggcactcgttaccttacccggaacttg

SEQ ID NO: 2517 - DNA, 3123 bp, Artificial Sequence
  Synthetic polynucleotide
gaattcgccctttctacggctgcgtcaactggaccaatgaaaactttcccttcaacgattgcgtcgacaagatggtgatctggtgggaggagggaaagatgaccgccaaggtcgtggaatctgccaaagccattctgggtggaggcaaggttcgtgtggaccagaaatgcaagtcttcggcccagatcgacccgactccggtgattgtcacctctaacaccaacatgtgcgccgtgattgacggaaactcgaccaccttcgagcaccagcagccgttgcaagaccggatgttcaaatttgaacttacccgccgtttggatcatgactttgggaaggtcaccaagcaggaagtcaaagactttttccggtgggctcaagatcacgtgactgaggtggagcatgagttctacgtcaaaaagggtggagccaagaaaaggcccgcccccgatgatgtatatataaatgagcccaagcgggcgcgcgagtcagttgcgcagccatcgacgtcagacgcggaagcttcgataaactacgcggacaggtaccaaaacaaatgttctcgtcacgtgggcatgaatctgatgctgtttccctgtcgacaatgcgaaagaatgaatcagaattcaaatatctgcttcacacacgggcaaaaagactgtttggaatgctttcccgtgtcagaatctcaacccgtttctgtcgtcagaaaaacgtatcagaaactttgttacattcatcatatcatgggaaaagtaccagacgcctgcactgcctgcgacctggtaaatgtggacttggatgactgtatttctgagcaataaatgacttaaatcaggtatggctgctgacggttatcttccagattggctcgaggacactctctctgaaggaatcagacagtggtggaagctcaaacctggcccaccaccgccgaaacctaaccaacaacaccgggacgacagtaggggtcttgtgcttcctgggtacaagtacctcggacccttcaacggactcgacaaaggagagccggtcaacgaggcagacgccgcggccctcgagcacgacaaagcctacgaccaccagctcaagcaaggggacaacccgtacctcaaatacaaccacgcggacgctgaatttcaggagcgtcttcaagaagatacgtctttcgggggcaacctcgggcgagcagtcttccaggccaaaaagagggtactcgagcctcttggtctggttgaggaagctgttaagacggctcctggaaaaaagagacctatagagcagtctcctgcagaaccggactcttcctcgggcatcggcaaatcaggccagcagcccgctaagaaaagactcaattttggtcagactggcgacacagagtcagtcccaggccctcaaccaatcggagaaccccccgcagccccctctggtgtgggatctaatacaatggcttcaggcggtggggcaccaatggcagacaataacgaaggcgccgacggagtgggtaattcctcgggaaattggcattgcgattccacatggatgggcgacagagttatcaccaccagcacaagaacctgggccctccccacctacaataatcacctctacaagcaaatctccagcgaatcgggagccaccaacgacaaccactacttcggctacagcaccccctgggggtattttgactttaacagattccactgtcacttctcaccacgtgactggcagcgactcatcaacaacaactggggatttagacccaagaaactcaatttcaagctcttcaacatccaagtcaaggaggtcacgcagaatgatggaaccacgaccatcgccaataaccttaccagcgcggtgcaggtcttcacagactctgagtaccagctgccctacgtcctcggttcggctcaccagggctgccttccgccgttcccagcagacgtcttcatgattcctcagtacggctacttgactctgaacaatggcagccaagcggtaggacgttcttcattctactgtctagagtattttccctctcagatgctgaggacgggaaacaacttcaccttcagctacacttttgaagacgtgcctttccacagcagctacgcgcacagccagagtctggatcggctgatgaatcctctcattgaccagtacctgtattacctgagcaaaactcagggtacaagtggaacaacgcagcaatcgagactgcagttcagccaagctgggcctagctccatggctcagcaggccaaaaactggctaccgggacccagctaccgacagcagcgaatgtctaagacggctaatgacaacaacaacagtgaatttgcttggactgcagccaccaaatattacctgaatggaagaaattctctggtcaatcccgggcccccagtggccagtcacaaggacgatgaggaaaagtatttccccatgcacggaaatctcatctttggaaaacaaggcacaggaactaccaatgtggacattgaatcagtgcttattacagacgaagaagaaatcagaacaactaatcctgtggctacagaacaatacggacaggttgccaccaaccatcagagtcagaacaccacagcttcctatggaagtgtggacagccagggaatcttacctggaatggtgtggcaggaccgcgatgtctatcttcaaggtcccatttgggccaaaactcctcacacggacggacactttcatccttctccgctcatgggaggctttggactgaaacaccctcctccccagatcctgatcaaaaacacacctgtgccagcgaatcccgcgaccactttcactcctggaaagtttgcttcgttcattacccagtattccacctgacaggtcagcgtggaaatagagtgggagctgcagaaagaaaacagcaaacgctggaacccagaaattcagtacacctccaactacaacaagtcggtgaatgtggagtttaccgtggacgcaaacggtgtttattctgaaccccgccctattggcactcgttaccttacccggaacttgtaatttcctgttaatgaataagccgatttatgcgtttcagttgaactttggtctctgcgaagggcgaattcgtttaaacct

SEQ ID NO: 2518 - protein, 735 aa, Artificial Sequence
  Synthetic polypeptide
MAADGYLPDWLEDTLSEGIRQWWKLKPGPPPPKPNQQHRDDSRGLVLPGYKYLGPFNGLDKGEPVNEADAAALEHDKAYDHQLKQGDNPYLKYNHADAEFQERLQEDTSFGGNLGRAVFQAKKRVLEPLGLVEEAVKTAPGKKRPIEQSPAEPDSSSGIGKSGQQPAKKRLNFGQTGDTESVPGPQPIGEPPAAPSGVGSNTMASGGGAPMADNNEGADGVGNSSGNWHCDSTWMGDRVITTSTRTWALPTYNNHLYKQISSESGATNDNHYFGYSTPWGYFDFNRFHCHFSPRDWQRLINNNWGFRPKKLNFKLFNIQVKEVTQNDGTTTIANNLTSAVQVFTDSEYQLPYVLGSAHQGCLPPFPADVFMIPQYGYLTLNNGSQAVGRSSFYCLEYFPSQMLRTGNNFTFSYTFEDVPFHSSYAHSQSLDRLMNPLIDQYLYYLSKTQGTSGTTQQSRLQFSQAGPSSMAQQAKNWLPGPSYRQQRMSKTANDNNNSEFAWTAATKYYLNGRNSLVNPGPPVASHKDDEEKYFPMHGNLIFGKQGTGTTNVDIESVLITDEEEIRTTNPVATEQYGQVATNHQSQNTTASYGSVDSQGILPGMVWQDRDVYLQGPIWAKTPHTDGHFHPSPLMGGFGLKHPPPQILIKNTPVPANPATTFTPGKFASFITQYSTGQVSVEIEWELQKENSKRWNPEIQYTSNYNKSVNVEFTVDANGVYSEPRPIGTRYLTRNL

SEQ ID NO: 2519 - DNA, 3123 bp, Artificial Sequence
  Synthetic polynucleotide
gaattcgccctttctacggctgcgtcaactggaccaatgaaaactttcccttcaacgattgcgtcgacaagatggtgatctggtgggaggagggaaagatgaccgccaaggtcgtggaatctgccaaagccattctgggtggaagcaaggttcgtgtggaccagaaatgcaagtcttcggcccagatcgacccgactccggtgattgtcacctctaacaccaacatgtgcgccgtgattgacggaaactcgaccaccttcgagcaccagcagccgttgcaagaccggatgttcaaatttgaacttacccgccgtttggatcatgactttgggaaggtcaccaagcaggaagtcaaagactttttccggtgggctcaagatcacgtgactgaggtggagcatgagttctacgtcaaaaagggtggagccaagaaaaggcccgcccccgatgatgtatatataaatgagcccaagcgggcgcgcgagtcagttgcgcagccatcgacgtcagacgcggaagcttcgataaactacgcgggcaggtaccaaaacaaatgttctcgtcacgtgggcatgaatctgatgctgtttccctgtcgacaatgcgaaagaatgaatcagaattcaaatatctgcttcacacacgggcaaaaagactgtttggaatgctttcccgtgtcagaatctcaacccgtttctgtcgtcagaaaaacgtatcagaaactttgttacattcatcatatcatgggaaaagaaccagacgcctgcactgcctgcgacctggtaaatgtggacttggatgactgtatttctgagcaataaatgacttaaatcaggtatggctgctgacggttatcttccagattggctcgaggacactctctctgaaggaatcagacagtggtggaagctcaaacctggcccaccaccgccgaaacctaaccaacaacaccgggacgacagtaggggtcttgtgcttcctgggtacaagtacctcggacccttcaacggactcgacaaaggagagccggtcaacgaggcagacgccgcggccctcgagcacgacaaagcctacgaccaccagctcaagcaaggggacaacccgtacctcaaatacaaccacgcggacgctgaatttcaggagcgtcttcaagaagatacgtctttcgggggcaacctcgggcgagcagtcttccaggccaaaaagagggtactcgagcctcttggtctggttgaggaagctgttaagacggctcctggaaaaaagagacctatagagcagtctcctgcagaaccggactcttcctcgggcatcggcgaatcaggccagcagcccgctaagaaaagactcaattttggtcagactggcgacacagagtcagtcccagaccctcaaccaatcggagaaccccccgcagccccctctggtgtgggatctaatacaatggcttcaggcggtggggcaccaatggcagacgataacgaaggcgccgacggagtgggtaattcctcgggaaattggcattgcgattccacatggatgggcgacagagttatcaccaccagcacaagaacctgggccctccccacctacaataatcacctctacaagcaaatctccagcgaatcgggagccaccaacgacaaccactacttcggctacagcaccccctgggggtattttgactttaacagattccactgtcacttctcaccacgtgactggcagcgactcatcaacaacaactggggatttagacccaagaaactcaatttcaagctcttcaacatccaagtcaaggaggtcacgcagaatgatggaaccacgaccatcgccaataaccttaccagcacggtgcaggtcttcacagactctgagtaccagctgccctacgtcctcggttcggctcaccagggctgccttccgccgttcccagcagacgtcttcatgattcctcagtacggctacttgactctgaacaatggcagccaagcggtaggacgttcttcattctactgtctagagtattttccctctcagatgctgaggacgggaaacaacttcaccttcagctacacttttgaagacgtgcctttccacagcagctacgcgcacagccagagtctggatcggctgatgaatcctctcattgaccagtacctgtattacctgagcaaaactcagggtacaagtggaacaacgcagcaatcgagactgcagttcagccaagctgggcctagctccatggctcagcaggccaaaaactggctaccgggacccagctaccgacagcagcgaatgtctaagacggctaatgacaacaacaacagtgaatttgcttggactgcagccaccaaatattacctgaatggaagaaattctctggtcaatcccgggcccccaatggccagtcacaaggacgatgaggaaaagtatttccccatgcacggaaatctcatctttggaaaacaaggcacaggaactaccaatgtggacattgaatcagtgcttattacagacgaagaagaaatcagaacaactaatcctgtggctacagaacaatacggacaggttgccaccaaccatcagagtcaggacaccacagcttcctatggaagtgtggacagccagggaatcttacctggaatggtgtggcaggaccgcgatgtctatcttcaaggtcccatttgggccaaaactcctcacacggacggacactttcatccttctccgctcatgggaggctttggactgaaacaccctcctccccagatcctgatcaaaaacacacctgtgccagcgaatcccgcgaccactttcactcctggaaagtttgcttcgttcattacccagtattccaccggacaggtcagcgtggaaatagagtgggagctgcagaaagaaaacagcaaacgctggaacccagaaattcagtacacctccaactacaacaagtcggtgaatgtggagtttaccgtggacgcaaacggtgtttattctgaaccccgccctattggcactcgttaccttacccggaacttgtaatttcctgttaatgaataaaccgatttatgcgtttcagttgaactttggtctctgcgaagggcgaattcgcggccgcta

SEQ ID NO: 2520 - protein, 735 aa, Artificial Sequence
  Synthetic polypeptide
MAADGYLPDWLEDTLSEGIRQWWKLKPGPPPPKPNQQHRDDSRGLVLPGYKYLGPFNGLDKGEPVNEADAAALEHDKAYDHQLKQGDNPYLKYNHADAEFQERLQEDTSFGGNLGRAVFQAKKRVLEPLGLVEEAVKTAPGKKRPIEQSPAEPDSSSGIGESGQQPAKKRLNFGQTGDTESVPDPQPIGEPPAAPSGVGSNTMASGGGAPMADDNEGADGVGNSSGNWHCDSTWMGDRVITTSTRTWALPTYNNHLYKQISSESGATNDNHYFGYSTPWGYFDFNRFHCHFSPRDWQRLINNNWGFRPKKLNFKLFNIQVKEVTQNDGTTTIANNLTSTVQVFTDSEYQLPYVLGSAHQGCLPPFPADVFMIPQYGYLTLNNGSQAVGRSSFYCLEYFPSQMLRTGNNFTFSYTFEDVPFHSSYAHSQSLDRLMNPLIDQYLYYLSKTQGTSGTTQQSRLQFSQAGPSSMAQQAKNWLPGPSYRQQRMSKTANDNNNSEFAWTAATKYYLNGRNSLVNPGPPMASHKDDEEKYFPMHGNLIFGKQGTGTTNVDIESVLITDEEEIRTTNPVATEQYGQVATNHQSQDTTASYGSVDSQGILPGMVWQDRDVYLQGPIWAKTPHTDGHFHPSPLMGGFGLKHPPPQILIKNTPVPANPATTFTPGKFASFITQYSTGQVSVEIEWELQKENSKRWNPEIQYTSNYNKSVNVEFTVDANGVYSEPRPIGTRYLTRNL

SEQ ID NO: 2521 - DNA, 3113 bp, Artificial Sequence
  Synthetic polynucleotide
gaattcgccctttctacggctgcgtcaactggaccaatgaaaactttcccttcaacgattgcgtcgacaagatggtgatctggtgggaggagggaaagatgaccgccaaggtcgtggaatctgccaaagccattctgggtggaagcaaggttcgtgtggaccagaaatgcaagtcttcggcccagatcgacccgactccggtgattgtcacctctaacaccaacatgtgcgccgtgattgacggaaactcgaccaccttcgagcaccagcagccgttgcaagaccggatgttcaaatttgaacttacccgccgtttggatcatgactttgggaaggtcaccaagcaggaagtcaaagactttttccggtgggctcaagatcacgtgactgaggtggagcatgagttctacgtcaaaaagggtggagccaagaaaaggcccgcccccgatgatgtatatataaatgagcccaagcgggcgcgcgagtcagttgcgcagccatcgacgtcagacgcggaagcttcgataaactacgcggacaggtaccaaaacaaatgttctcgtcacgtgggcatgaatctgatgctgtttccctgtcgacaatgcgaaagaatgaatcagaattcaaatatctgcttcacacacgggcaaaaagactgtttggaatgctttcccgtgtcagaatctcaacccgttcctgtcgtcagaaaaacgtatcagaaactttgttacattcatcatatcatgggaaaagtaccagacgcctgcactgcctgcgacctggtaaatgtggacttggatgactgtatttctgagcaataaatgacttaaatcaggtatggctgctgacggttatcttccagattggctcgaggacactctctctgaaggaatcagacagtggtggaagctcaaacctggcccaccaccgccgaaacctaaccaacaacaccgggacgacagtaggggtcttgtgcttcctgggtacaagtacctcggacccttcaacggactcgacaaaggagagccggtcaacgaggcagacgccgcggccctcgagcacgacaaagcctacgaccaccagctcaagcaaggggacaacccgtacctcaaatacaaccacgcggacgctgaatttcaggagcgtcttcaagaagatacgtctttcgggggcaacctcgggcgagcagtcttccaggccaaaaagagggtactcgagcctcttggtctggttgaggaagctgttaagacggctcctggaaaaaagagacctatagagcagtctcctgcagaaccggactcttcctcgggcatcggcaaatcaggccagcagcccgctaagaaaagactcaattttggtcagactggcgacacagagtcagtcccagaccctcaaccaatcggagaaccccccgcagccccctctggtgtgggatctaatacaatggcttcaggcggtggggcaccaatggcagacaataacgaaggcgccgacggagtgggtaattcctcgggaaattggcattgcgattccacatggatgggcgacagagttatcaccaccagcacaagaacctgggccctccccacctacaataatcacctctacaagcaaatctccagcgaatcgggagccaccaacgacaaccactacttcggctacagcaccccctgggggtattttgactttaacagattccactgtcacttctcaccacgtgactggcagcgactcatcaataacaactggggatttagacccaagaaactcaatttcaagctcttcaacatccaagtcaaggaggtcacgcagaatgatggaaccacgaccatcgccaataaccttaccagcacggtgcaggtcttcacagactctgagtaccagctgccctacgtcctcggttcggctcaccagggctgccttccgccgttcccagcagacgtcttcatgattcctcagtacggctacttgactctgaacaatggcagccaagcggtaggacgttcttcattctactgtctagagtattttccctctcagatgctgaggacgggaaacaacttcaccttcagctacacttttgaagacgtgcctttccacagcagctacgcgcacagccagagtctggatcggctgatgaatcctctcattgaccagtacctgtattacctgagcaaaactcagggtacaagtggaacaacgcagcaatcgagactgcagttcaaccaagctgggcctagctccatggctcagcaggccaaaaactggctaccgggacccagctaccgacagcagcgaatgtctaagacggctaatgacaacaacaacagtgaatttgcttggactgcagccaccaaatattacccgaatggaagaaattctctggtcaatcccgggcccccaatggccagtcacaaggacgatgaggaaaagtatttccccatgcacggaaatctcatctttggaaaacaaggcacaggaactaccaatgtggacattgaatcagtgcttattacagacgaagaagaaatcagaacgactaatcctgtggctacagaacaatacggacaggttgccaccaaccgtcagagtcagaacaccacagcttcctatggaagtgtggacagccagggaatcttacctggaatggtgtggcaggaccgcgatgtctatcttcaaggtcccatttgggccaaaactcctcacacggacggacactttcatccttctccgctcatgggaggctttggactgaaacaccctcctccccagatcctgatcaaaaacacacctgtgccagcgaatcccgcgaccactttcactcctggaaagtttgcttcgttcattacccagtattccaccggacaggtcagcgtggaaatagagtgggagctgcagaaagaaaacagcaaacgctggaacccggaaattcagtacacctccaactacaacaagtcggtgaatgtggagtttaccgtggacgcaaacggtgtttattctgaaccccgccctattggcactcgttaccttacccggaacttgtaatttcctgttaatgaataaaccgatttatgcgtttcagttgaactttggtctctgcgaagggcgaattc

SEQ ID NO: 2522 - protein, 735 aa, Artificial Sequence
  Synthetic polypeptide
MAADGYLPDWLEDTLSEGIRQWWKLKPGPPPPKPNQQHRDDSRGLVLPGYKYLGPFNGLDKGEPVNEADAAALEHDKAYDHQLKQGDNPYLKYNHADAEFQERLQEDTSFGGNLGRAVFQAKKRVLEPLGLVEEAVKTAPGKKRPIEQSPAEPDSSSGIGKSGQQPAKKRLNFGQTGDTESVPDPQPIGEPPAAPSGVGSNTMASGGGAPMADNNEGADGVGNSSGNWHCDSTWMGDRVITTSTRTWALPTYNNHLYKQISSESGATNDNHYFGYSTPWGYFDFNRFHCHFSPRDWQRLINNNWGFRPKKLNFKLFNIQVKEVTQNDGTTTIANNLTSTVQVFTDSEYQLPYVLGSAHQGCLPPFPADVFMIPQYGYLTLNNGSQAVGRSSFYCLEYFPSQMLRTGNNFTFSYTFEDVPFHSSYAHSQSLDRLMNPLIDQYLYYLSKTQGTSGTTQQSRLQFNQAGPSSMAQQAKNWLPGPSYRQQRMSKTANDNNNSEFAWTAATKYYPNGRNSLVNPGPPMASHKDDEEKYFPMHGNLIFGKQGTGTTNVDIESVLITDEEEIRTTNPVATEQYGQVATNRQSQNTTASYGSVDSQGILPGMVWQDRDVYLQGPIWAKTPHTDGHFHPSPLMGGFGLKHPPPQILIKNTPVPANPATTFTPGKFASFITQYSTGQVSVEIEWELQKENSKRWNPEIQYTSNYNKSVNVEFTVDANGVYSEPRPIGTRYLTRNL

SEQ ID NO: 2523 - DNA, 3122 bp, Artificial Sequence
  Synthetic polynucleotide
agcggccgcgaattcgccctttctacggctgcgtcaactggaccaatgaaaactttcccttcaacgattgcgtcgacaagatggtgatctggtgggaggagggaaagatgaccgccaaggtcgtggaatctgccaaagccattctgggtggaagcaaggttcgtgtggaccagaaatgcaggtcttcggcccagatcgacccgactccggtgattgtcacctctaacaccaacatgtgcgccgtgattgacggaaactcgaccaccttcgagcaccagcagccgttgcaagaccggatgttcaaatttgaacttacccgccgtttggatcatgactttgggaaggtcaccaagcaggaagtcaaagactttttccggtgggctcaagatcacgtgactgaggtggagcatgagttctacgtcaaaaagggtggagccaagaaaaggcccgcccccgatgatgtatatataaatgagcccaagcgggcgcgcgagtcagttgcgcagccatcgacgtcagacgcggaagcttcgataaactacgcggacaggtaccaaaacaaatgttctcgtcacgtgggcatgaatctgatgctgtttccctgtcgacaatgcgaaagaatgaatcagaattcaaatatctgcttcacacacgggcaaaaagactgtttggaatgctttcccgtgtcagaatctcaacccgtttctgtcgtcagaaaaacgtatcagaaactttgttacattcatcatatcatgggaaaagtaccagacgcctgcactgcctgcgacctggtaaatgtggacttggatgactgtatttctgagcaataaatgacttaaatcaggtatggctgctgacggttatcttccagattggctcgaggacactctctctgaaggaatcagacagtggtggaagctcaaacctggcccaccaccgccgaaacctaaccaacaacaccgggacgacagtaggggtcttgtgcttcctgggtacaagtacctcggacccttcaacggactcgacaaaggagagccggtcaacgaggcagacgccgcggccctcgagcacgacaaagcctacgaccaccagctcaagcaaggggacaacccgtacctcaaatacaaccacgcggacgctgaatttcaggagcgtcttcaagaagatacgtctttcgggggcaacctcgggcgagcagtcttccaggccaaaaagagggtactcgagcctcttggtctggttgaggaagctgttaagacggctcctggaaaaaagagacctatagagcagtctcctgcagaaccggactcttcctcgggcatcggcaaatcaggccagcagcccgctaagaaaagactcaattttggtcagactggcgacacagagtcagtcccagaccctcaaccaatcggagaaccccccgcagccccctctggtgtgggatctaatacaatggcttcaggcggtggggcaccaatggcagacaataacgaaggcgccgacggagtgggtaattcctcgggaaattggcattgcgattccacatggatgggcgacagagttatcaccaccagcacaagaacctgggccctccccacctacaataatcgcctctacaagcaaatctccagcgaatcgggagccaccaacgacaaccactacttcggctacagcaccccctgggggtattttgactttaacagattccactgtcacttctcaccacgtgactggcagcgactcatcaacaacaactggggatttagacccaagaaactcaatttcaagctcttcaacatccaagtcaaggaggtcacgcagaatgatggaaccacgaccatcgccaataaccttaccagcacggtgcaggtcttcacagactctgagtaccagctgccctacgtcctcggttcggctcaccagggctgccttccgccgttcccagcagacgtcttcatgattcctcagtacggctacttgactctgaacaatggcagccaagcggtaggacgttcttcattctactgtctagagtattttccctctcagatgctgaggacgggaaacaacttcaccttcagctacacttttgaagacgtgcctttccacagcagctacgcgcacagccagagtctggatcggctgatgaatcctctcattgaccagtacctgtattacctgagcaaaactcagggtacaagtggaacaacgcagcaatcgagactgcagttcagccaagctgggcctagctccatggctcagcaggccaaaaactggctaccgggacccagctaccgacagcagcgaatgtctaagacggctaatgacaacaacaacagtgaatttgcttggactgcagccaccaaatattacctgaatggaagaaattctctggtcaatcccgggcccccaatggccagtcacaaggacgatgaggaaaagtatttccccatgcacggaaatctcatctttggaaaacaaggcacaggaactaccaatgtggacattgaatcagtgcttattacagacgaagaagaaatcagaacaactaatcctgtggctacagaacaatacggacaggttgccaccaaccatcagagtcagaacaccacagcttcctatggaagtgtggacagccagggaatcttacctggaatggtgtggcaggaccgcgatgtctatcttcaaggtcccatttgggccaaaactcctcacacggacggacactttcatccttctccgctcatgggaggctttggactgaaacaccctcctccccagatcctgatcaaaaacacacctgtgccagcgaatcccgcgaccactttcactcctggaaagtttgcttcgttcattacccagtattccaccggacaggtcagcgtggaaatagagtgggagctgcagaaagaaaacagcaaacgctggaacccagaaattcagtacacctccaactacaacaagtcggtgaatgtggagtttaccgtggacgcaaacggtgtttattctgaaccccgccctattggcactcgttaccttacccggaacttgtaatttcctgttaatgaataaaccgatttatgcgtttcagttgaactttggtctctgcgaagggcgaattc

SEQ ID NO: 2524 - protein, 735 aa, Artificial Sequence
  Synthetic polypeptide
MAADGYLPDWLEDTLSEGIRQWWKLKPGPPPPKPNQQHRDDSRGLVLPGYKYLGPFNGLDKGEPVNEADAAALEHDKAYDHQLKQGDNPYLKYNHADAEFQERLQEDTSFGGNLGRAVFQAKKRVLEPLGLVEEAVKTAPGKKRPIEQSPAEPDSSSGIGKSGQQPAKKRLNFGQTGDTESVPDPQPIGEPPAAPSGVGSNTMASGGGAPMADNNEGADGVGNSSGNWHCDSTWMGDRVITTSTRTWALPTYNNRLYKQISSESGATNDNHYFGYSTPWGYFDFNRFHCHFSPRDWQRLINNNWGFRPKKLNFKLFNIQVKEVTQNDGTTTIANNLTSTVQVFTDSEYQLPYVLGSAHQGCLPPFPADVFMIPQYGYLTLNNGSQAVGRSSFYCLEYFPSQMLRTGNNFTFSYTFEDVPFHSSYAHSQSLDRLMNPLIDQYLYYLSKTQGTSGTTQQSRLQFSQAGPSSMAQQAKNWLPGPSYRQQRMSKTANDNNNSEFAWTAATKYYLNGRNSLVNPGPPMASHKDDEEKYFPMHGNLIFGKQGTGTTNVDIESVLITDEEEIRTTNPVATEQYGQVATNHQSQNTTASYGSVDSQGILPGMVWQDRDVYLQGPIWAKTPHTDGHFHPSPLMGGFGLKHPPPQILIKNTPVPANPATTFTPGKFASFITQYSTGQVSVEIEWELQKENSKRWNPEIQYTSNYNKSVNVEFTVDANGVYSEPRPIGTRYLTRNL

SEQ ID NO: 2525 - DNA, 3121 bp, Artificial Sequence
  Synthetic polynucleotide
gaattcgcccttcgcagagaccaaagttcaactgaaacgaatcaaccggtttattgattaacaagcaattacagattacgggtgaggtaacgggtgccgatggggcgaggctcagaataagtgccatctgtgttaacagcaaagtccacatttgtagatttgtagtagttggaagtgtattgaatctctgggttccagcgtttgctgttttctttctgcagctcccattcaatttccacgctgacctgtccggtgctgtactgcgtgatgaacgacgccagcttagcttgactgaaggtagttggaggatccgcgggaacaggtgtattcttaatcaggatctgaggaggcgggtgtttcagtccaaagccccccatcagcggcgagggatgaaagtttccgtccgtgtgaggaatcttggcccagataggaccctgcaggtacacgtcccggttctgccagaccatgccaggtaaggctccttgactgttgacggcccctacaataggagcggcgttttgctgttgcaggttatcggccaccacgccgtactgttctgtggccactgggttggtggttttaatttcttcctcactggttagcataacgctgctatagtccacgttgccttttccagctccctgtttcccaaacattaagactccgctggacggaaaaaatcgctcttcgtcgtccttgtgggttgccatagcgacaccgggatttaccagagagtctctgccattcagatgatacttggtggcaccggtccaggcaaagttgctgttgttattttgcgacagtgtcgtggagacgcgttgctgccggtagcagggcccgggtagccagtttttggcctgagccgacatgttattaggcccggcctgagaaaatagcaactgctgagttcctgcggtacctcccgtggactgagtccgagacaggtagtacaggtactggtcgatgagggggttcatcagccggtccaggctttggctgtgcgcgtagctgctgtgaaaaggcacgtcctcaaactggtagctgaactcaaagttgttgcccgttctcagcatttgagaaggaaagtactccaggcagtagaaggaggaacggcccacggcctgactgccattgttcagagtcaggtacccgtactgaggaatcatgaagacgtccgccgggaacggaggcaggcagccctggcgcgcagagccgaggacgtacgggagctggtattccgagtccgtaaagacctgaatcgtgctggtaaggttattggcgatggtcttggtgccttcattctgcgtgacctccttgacctggatgttgaagagcttgaagttgagtctcttgggccggaatccccagttgttgttgatgagtcgctgccagtcacgtggtgagaagtggcagtggaatctgttaaagtcaaaatacccccagggggtgctgtagccgaagtaggtgttgtcgttggtgcttcctcccgaagtcccgttggagatttgcttgtagaggtggttgttgtaggtggggagggcccaggttcgggtgctggtggtgatgactctgtcgcccagccatgtggaatcgcaatgccaatttcctgaggaactacccactccgtcggcgccttcgttattgtctgccattggagcgccaccgcctgcagccattgtaccagatcccagaccagaggggcctgcggggggttctccgattggttgagggtcgggcactgactctgagtcgccagtctgcccaaagttgagtctctttttcgcgggctgctggcctttcttgccgatgcccgtagtggagtctggagaacgctggggtgatggctctaccggtctcttctttccaggagccgtcttagcgccttcctcaaccagaccgagaggttcgagaacccgcttcttggcctggaagactgctcgtccgaggttgcccccaaaagacgtatcttcttgcagacgctcctgaaactcggcgtcggcgtggttataccgcaggtacggattgtcacccgctttgagctgctggtcgtaggccttgtcgtgctcgagggccgctgcgtccgccgcgttgacgggctcccccttgtcgagtccgttgaagggtccgaggtacttgtagccaggaagcaccagaccccggccgtcgtcctgcttttgctggttggctttgggcttcggggctccaggtttcagcgcccaccactcgcgaatgccctcagagaggttgtcctcgagccaatctggaagataaccatcggcagccatacctgatctaaatcatttattgttcaaagatgcagtcatccaaatccacattgaccagatcgcaggcagtgcaagcgtctggcacctttcccatgatatgatgaatgtagcacagtttctgatacgcctttttgacgacagaaacgggttgagattctgacacgggaaagcactctaaacagtctttctgtccgtgagtgaagcagatatttgaattctgattcattctctcgcattgtctgcagggaaacagcatcagattcatgcccacgtgacgagaacatttgttttggtacctgtccgcgtagttgatcgaagcttccgcgtctgacgtcgatggctgcgcaactgactcgcgcacccgtttgggctcacttatatctgcgtcactgggggcgggtcttttcttggctccaccctttttgacgtagaattcatgctccacctcaaccacgtgatcctttgcccaccggaaaaagtctttgacttcctgcttggtgaccttcccaaagtcatgatccagacggcgggtgagttcaaatttgaacatccggtcttgcaacggctgctggtgttcgaaggtcgttgagttcccgtcaatcacggcgcacatgttggtgttggaggtgacgatcacgggagtcgggtctatctgggccgaggacttgcatttctggtccacgcgcaccttgcttcctccgagaatggctttggccgactccacgaccttggcggtcatcttcccctcctcccaccagatcaccatcttgtcgacacagtcgttgaagggaaagttctcattggtccagttgacgcagccgtagaagggcgaattc

SEQ ID NO: 2526 - protein, 733 aa, Artificial Sequence
  Synthetic polypeptide
MAADGYLPDWLEDNLSEGIREWWDLKPGAPKLKANQQKQDDGRGLVLPGYKYLGPFHGLDKGEPVNAADAAALEHDKAYDQQLKAGDNPYLRYNHADAEFQERLQEDTSFGGNLGRAVFQAKKRVLEPLGLVEEGAKTAPGKKRPLESPQEPDSSSGIGKKGKQPAKKRLNFEEDTGAGDGPPEGSDTSAMSSDIEMRAAPGGNAVDAGQGSDGVGNASGDWHCDSTWSEGKVTTTSTRTWVLPTYNNHLYLRLGTTSNSNTYNGFSTPWGYFDFNRFHCHFSPRDWQRLINNNWGLRPKAMRVKIFNIQVKEVTTSNGETTVANNLTSTVQIFADSSYELPYVMDAGQEGSLPPFPNDVFMVPQYGYCGIVTGENQNQTDRNAFYCLEYFPSQMLRTGNNFEMAYNFEKVPFHSMYAHSQSLDRLMNPLLDQYLWHLQSTTSGETLNQGNAATTFGKIRSGDFAFYRKNWLPGPCVKQQRFSKTASQNYKIPASGGNALLKYDTHYTLNNRWSNIAPGPPMATAGPSDGDFSNAQLIFPGPSVTGNTTTSANNLLFTSEGEIAATNPRDTDMFGQIADNNQNATTAPITGNVTAMGVLPGMVWQNRDIYYQGPIWAKIPHADGHFHPSPLIGGFGLKHPPPQIFIKNTPVPANPATTFTAARVDSFITQYSTGQVAVQIEWEIEKERSKRRNPEVQFTSNYGNQSSMLWAPDTTGKYTEPRVIGSRYLTNHL

SEQ ID NO: 2527 - protein, 735 aa, Artificial Sequence
  Synthetic polypeptide
MAADGYLPDWLEDTLSEGIRQWWKLKPGPPPPKPNQQHRDDSRGLVLPGYKYLGPFNGLDKGEPVNEADAAALEHDKAYDHQLKQGDNPYLKYNHADAEFQERLQEDTSFGGNLGRAVFQAKKRVLEPLGLVEEAVKTAPGKKRPIEQSPAEPDSSSGIGKSGQQPAKKRLNFGQTGDTESVPDPQPIGEPPAAPSGVGSNTMASGGGAPMADNNEGADGVGNSSGNWHCDSTWMGDRVITTSTRTWALPTYNNHLYKQISSESGATNDNHYFGYSTPWGYFDFNRFHCHFSPRDWQRLINNNWGFRPKKLNFKLFNIQVKEVTQNDGTTTIANNLTSTVQVFTDSEYQLPYVLGSAHQGCLPPFPADVFMIPQYGYLTLNNGSQAVGRSSFYCLEYFPSQMLRTGNNFTFSYTFEDVPFHSSYAHSQSLDRLMNPLIDQYLYYLSKTQGTSGTTQQSRLQFSQAGPSSMAQQAKNWLPGPSYRQQRMSKTANDNNNSEFAWTAATKYYLNGRNSLVNPGPPMASHKDDEEKYFPMHGNLIFGKQGTGTTNVDIESVLITDEEEIRTTNPVATEQYGQVATNHQSQNTTASYGSVDSQGILPGMVWQDRDVYLQGPIWAKIPHTDGHFHPSPLMGGFGLKHPPPQILIKNTPVPANPATTFTPGKFASFITQYSTGQVSVEIEWELQKENSKRWNPEIQYTSNYNKSVNVEFTVDANGVYSEPRPIGTRYLTRNL

SEQ ID NO: 2528 - DNA, 3127 bp, Artificial Sequence
  Synthetic polynucleotide
gcggccgcgaattcgcccttcgcagagaccaaagttcaactgaaacgaatcaaccggtttattgattaacatgcaattacagattacgggtgaggtaacgagtgccaatagggcgaggctcagagtaaacaccctggctgtcaacggcaaagtccacaccagtctgcttttcaaagttggaggtgtactgaatctccgggtcccagcgcttgctgttttccttctgcagctcccactcgatttccacgctgacttgtccggtgctgtactgtgtgatgaacgaagcaaacttggcaggagtaaacacctccggaggattagcgggaacgggagtgttcttgatcaggatctgaggaggcggatgtttaagtccaaagccgcccatcaaaggagacgggtgaaagttgccatccgtgtgaggaatcttggcccagatgggaccctgcaggtacacgtcccggttctgccagaccatgccaggtaaggctccctggttgttgacaacttgtgtctgggctgcagtattagccgcttgtaagttgctgctgactatcccgtattcttccgtggctacaggattagtaggacgaatttcttcttcatttgtcattaacacattttccaatgtagttttgttagttgctccagtttttccaaaaatcaggactccgctggatgggaaaaagcggtcctcgtcgtccttgtgagttgccatggcgacgccgggattaaccaacgagtttctgccgttcaggtgatatttggtggcaccagtccaagcaaagttgctgttgttgttttgatccagcgttttggagaccctttgttgccggaagcagggtccaggtaaccaattcttggcttgttcggccatagttgaaggcccgccctggtaaaactgcagttcccgattgccagctgtgcctcctgggtcactctgtgttctggccaggtagtacaagtactggtcgatgaggggattcatcagccggtccaggctctggctgtgtgcgtagctgctgtggaaaggcacgtcctcgaagctgtagctgaactcaaagttgttgcccgttctcagcatctgagaggggaagtactccaggcagtagaaggaggaacgtcccacagactgactgccattgttgagagtcaggtagccgtactgaggaatcatgaagacgtccgccgggaacggaggcaggcagccctggtgcgcagagccgaggacgtacggcagctggtattccgagtccgagaatacctgaatcgtgctggtaaggttattagcgatggtcgtaacgccgtcattcgtcgtgacctccttgacctggatgttgaagagcttgaaccgcagcttcttgggccggaatccccagttgttgttgatgagtcgctgccagtcacgtggtgagaagtggcagtggaatctgttaaagtcaaaatacccccagggggtgctgtagccgaagtaggtgttgtcgttggtactacctgcagtttcactggagatttgctcgtagaggtggttgttgtaggtgggcagggcccaggttcgggtgctggtggtaatgactctgtcgcccagccatgtggaatcgcaatgccaatttcctgaggcattacccactccgtcggcaccttcgttattgtctgccattggtgcgccaccgcctgcagccactgtaccagatcccacactagagggcgctgctggaggttctccgagaggttgagggtcggggactgactctgagtcgccagtctgaccgaaattgagtctctttctggcgggctgctggcccttcttgccgatgcccgtggaggagtcgggggaacgctgaggtgacggctctaccggtctcttctttgcaggagccgtcttagcgccttcctcaaccagaccgagaggttcgagaacccgcttcttggcctggaagactgctcgcccgaggttgcccccaaatgacgtatcttcttgcagacgctcctgaaactcggcgtcggcgtggttataccgcaggtacgggttgtcacccgcattgagctgctggtcgtaggccttgtcgtgctcgagggccgctgcgtccgccgcgttgacgggctcccccttgtcgagtccgttgaagggtccgaggtacttgtagccaggaagcaccagaccccggccgttgtcctgcttttgctggttggctttgggtttcggggctccaggtttcaggtcccaccactcgcgaatgccctcagagaggttgtcctcgagccaatctggaagataaccatcggcagccatacctgatttaaatcatttattgttcaaagatgcagtcatccaaatccacattgaccagatcgcaggcagtgcaagcgtctggcacctttcccatgatatgatgaatgtagcacagtttctgatacgcctttttgacgacagaaacgggtttagattctgacacgggaaagcactctaaacagtctttctgtccgtgagtgaagcagatatttgaattctgattcattctctcgcattgtctgcagggaaacagcatcagattcatgcccacgtgacgagaacatttgttttggtacctgtctgcgtagttgatcgaagcttccgcgtctgacgtcgatggctgcgcaactgactcgcgcacccgtttgggctcacttatatctgcgtcactgggggcgggtcttttcttggctccaccctttttgacgtagaattcatgctccacctcaaccacgtaatcctttgcccaccggaaaaagtctttgacttcctgcttggtgaccttcccaaagtcatgatccagacggcgggtgagttcaaatttgaacatccggtcttgcaacggctgctggtgttcgaaggtcgttgagttcccgtcgatcacggcgcacatgttggtgttggagatgacgatcgcgggagtcgggtctatctgggccgaggacttgcatttctggtccacgcgcaccttgcttcctccgagaatggctttggccgactccacgaccttggcggtcatcttcccctcctcccaccagatcaccatcttgtcgacacagtcgttgaagggaaagttctcattggtccagttgacgcagccgtagaaagggcgaattc

SEQ ID NO: 2529 - protein, 728 aa, Artificial Sequence
  Synthetic polypeptide
MAADGYLPDWLEDNLSEGIREWWDLKPGAPKPKANQQKQDDGRGLVLPGYKYLRPFNGLDKGEPVNEADAAALEHDKAYDKQLEQGDNPYLKYNHADAEFQERLQEDTSFGGNLGRAVFQAKKRVLEPLGLVEEVAKTAPGKKRPIESPDSSTGIGKKGQQPAKKKLNFGQTGDSESVPDPQPLGEPPAAPSGLGSGTMAAGGGAPMADNNEGADGVGNASGNWHCDSTWLGDRVITTSTRTWALPTYNNHLYKQISSQSGATNDNHFFSYSTPWGYFDFNRFHCHFSPRDWQRLINNNWGFRPRKLRFKLFNIQVKEVTTNDGVTTIANNLTSTIQVFSDSEYQLPYVLGSAHQGCLPPFPADVFMIPQYGYLTLNNGSQSVGRSSFYCLEYFPSQMLRTGNNFEFSYTFEEVPFHSSYVHSQSLDRLMNPLIDQYLYYLARTQSTTGSTRELQFHQAGPNTMAEQSKNWLPGPCYRQQRLSKNIDSNNNSNFAWTGATKYHLNGRNSLTNPGVAMATNKDDEDQFFPINGVLVFGKTGAANKTTLENVLMTSEEEIKTTNPVATEEYGVVSSNLQSSTAGPQTQTVNSQGALPGMVWQNRDVCLQGPIWAKIPHTDGNFHPSPLMGGFGLKHPPPQILIKNTPVPANPPEVFTPAKFASFITQYSTGQVSVEIEWELQKENSKRWNPEIQYTSNYAKSNNVEFAVNNEGVYTEPRPIGTRYLTRNL

SEQ ID NO: 2530 - DNA, 3106 bp, Artificial Sequence
  Synthetic polynucleotide
gcggccgcgaattcgcccttcgcagagaccaaagttcaactgaaacgaatcaaccggtttattgattaacaagtaattacaggttacgggtgaggtaacgggtgccaatggggcgaggctcagtataaaccccttcgttgttgacagcaaattccacattattagacttggcataatttgaggtgtactgaatctctggattccagcgtttgctgttttctttctgcagttcccactcgatctccacgctgacctggccggtgctgtactgcgtgataaatgaggcaaacttggcaggagtaaacacctctggaggattagcaggtaccggggtgtttttgatgagaatttgaggaggcgggtgtttgagtccaaatccgcccatcaggggagacgggtgaaagttgccgtccgtgtgaggaattttggcccagatgggaccctgcaggcacacgtcccggttctgccagaccatgccgggcagagccccctggctgttgacagtctgtgtctggggtccggccgtagacgattgcaggttgctggagaccacaccgtattcttctgtagccacgggattggtggttttgatctcctcctcgctggtcattagcacgttttccagcgttgtcttgttggcagcccccgttttgccaaaaaccagcactccgttgatgggaaagaactggtcctcgtcgtccttgttggtggccatggctacgcccgggttggttaatgaatttctaccattcagatggtatttagtggccccggtccaggcaaagttactgttgttgttgctgtctatgttttttgacagtctctgctgccgataacagggtccgggcagccagttctttgattgctcggccatggtgttgggcccagcctgatggaactgcagctcccttgtggaccccgtagtgctctgggtccgggccaggtagtacaggtactggtcgatgaggggattcatcagccggtctaggctctggctgtgcacatagctgctgtggaaaggcacttcctcaaaggtgtagctgaattcaaagttattgcccgttctcagcatctgagaaggaaagtactccaggcagtagaaggaggaacgtcccacagactgactgccgttgtttagagtcagatatccgtactgaggaatcatgaacacgtccgcagggaacggagggaggcagccctggtgcgcagagccgaggacgtacggcagttggtactccgagtccgagaagacctgaatcgtgctggtaaggttattagcgatggtcgtaacgccgtcgttcgtcgtgacctccttgacctggatgttgaacaacttgaaccgcagctttctgggccggaatccccagttgttgttgatgagtcgctgccagtcacgtggtgagaagtggcagtggaatctgttgaagtcaaaatagccccagggggtgctgtagctgaagaagtggttgtcgttggtagccccgctctgacttgatatctgcttgtagaggtggttgttgtaggtgggcagggcccaggtgcgggtgctggtggtgatgactctgtcgcccagccatgtggaatcgcaatgccaatttccggaggcattacccactccgtcggcgccttcgttattgtctgccattggtgcgccaccgcctgcagccattgtaccagatcccagacctgagggcgcggcgggaggttctccgagaggttgggggtcgggcactgactctgagtcgccagtctgcccaaagttgagcttctttttagcgggctgctggcctttcttgccgatgcccgtggaggagtcgggggattctatgggtctcttctttccaggagccgtcttagcgacttcctcaaccagaccgagaggttcgagaacccgcttcttggcctggaagactgctcgcccgaggttgcccccaaaagacgtatcttcttgaagacgctcctgaaactcggcgtcggcgtggttgtacttgaggtacgggttgtccccctgctcgagctgcttgtcgtaggccttgtcgtgctcgagggccgcggcgtctgcctcgttgaccggctctcccttgtcgagtccgttgaagggtctgaggtacttgtagccaggaagcaccagaccccggccgtcgtcctgcttttgctggttggctttgggtttcggggctccaggtttcaagtcccaccactcgcgaatgccctcagagaggttgtcctcgagccaatctggaagataaccatcggcagccatacctggtttaagtcatttattgctcagaaacacagtcatccaggtccacgttgaccagatcgcaggccgagcaagcaatctcgggagcccgccccagcagatgatgaatggcacagagtttccgatacgtcctctttctgacgaccggttgagattctgacacgccggggaaacattctgaacagtctctggtcccgtgcgtgaagcaaatgttgaaattctgattcactctctcgcatgtcttgcagggaaacagcatctgaagcatgcccgcgtgacgagaacatttgttttggtacctgtcggcaaagtccaccggagctccttccgcgtctgacgtcgatggattcgcgactgaggggcaggcccgcttgggctcgcttttatccgcgtcatcgggggcgggtctcttgttggccccaccctttctgacgtagaacccatgcgccacctcggtcacgtgatcctgcgcccagcggaagaaccttttgacttcctgctttgtcaccttgccaaagttatgctccagacggcgggtgggttcaaatttgaacatccggtcctgcaacggctgctggtgctcgaaggtggcgctgttcccgtcaatcacggcgcacatgttggtgttggaggtgacggtcacgggggtggggtcgatctgggcggacgacttgcacttttggtccacgcgcaccttgctgccgccgagaatggccttggcggactccacgaccttggccgtcatcttgccctcctcccaccagatcaccatcttgtcggcgcaatcgttgaagggaaagttctcattggtccagttgacgcagccgtagaaagggcgaattc

SEQ ID NO: 2531 - protein, 728 aa, Artificial Sequence
  Synthetic polypeptide
MAADGYLPDWLEDNLSEGIREWWDLKPGAPKPKANQQKQDDGRGLVLPGYKYLGPFNGLDKGEPVNEADAAALEHDKAYDKQLEQGDNPYLKYNHADAEFQERLQEDTSFGGNLGRAVFQAKKRVLEPLGLVEEGAKTASGKKRPIESPDSSTGIGKKGQQPAKKKLNFGQTGDSESVPDPQPLGEPPAAPSGLGSGTMAAGGGAPMADNNEGADGVGNASGNWHCDSTWLGDRVITTSTRTWALPTYNNHLYKQISSQSGATNDNHFFGYSTPWGYFDFNRFHCHFSPRDWQRLINNNWGFRPRKLRFKLFNIQVKEVTTNDGVTTIANNLTSTIQVFSDSEYQLPYVLGSAHQGCLPPFPADVFMIPQYGYLTLNNGSQSVGRSSFCCLEYFPSQMLRTGNNFEFSYTFEEVPFHSSYAHSQSLDRLMNPLIDQYLYYLARTQSTTGSTRELQFHQAGPNTVAEQSKNWLPGPCYRQQRLSKNIDSNNNSNFAWTGATKYHLNGRNSLTNPGVAMATNKDDEDQFLPINGVLVFGKTGAANKTTLENVLMTSEEEIKTTNPVATEEYGVVSSNLQSSTAGPRTQTVNSQGALPGMVWQNRDVYLQGPIWAEIPHTDGNFHPSPLMGGFGLKHPPPQILIKNTPVPANPPEVFTPAKFASFITQYSTGQVSVEIEWELQKENSKRWNPEIQYTSNYAKSNNVEFAVNNEGVYTEPRPIGTRYLTRNL

SEQ ID NO: 2532 - DNA, 3102 bp, Artificial Sequence
  Synthetic polynucleotide
gcggccgcgaattcgcccttcgcagagaccaaagttcaactgaaacgaatcaaccggtttattgattaacaagtaattacaggttacgggtgaggtaacgggtgccaatggggcgaggctcagtataaaccccttcgttgttgacagcaaattccacattattagacttggcataatttgaggtgtactgaatctctggattccagcgtttgctgttttctttctgcagttcccactcgatctccacgctgacctggccggtgctgtactgcgtgataaatgaggcaaacttggcaggagtaaacacctctggaggattagcaggtaccggggtgtttttgatgagaatttgaggaggcgggtgtttgagtccaaatccgcccatcaggggagacgggtgaaagttgccgtccgtgtgaggaatttcggcccagatgggaccctgcaggtacacgtcccggttctgccagaccatgccgggcagagccccctggctgttgacagtctgtgtccggggtccggccgtagacgattgcaggttgctggagaccacaccgtattcttctgtagccacgggattggtggttttgatctcctcctcgctggtcattagcacgttttccagcgttgtcttgttggcagcccccgttttgccaaaaaccagcactccgttgatgggaaggaactggtcctcgtcgtccttgttggtggccatggctacgcccgggttggttaatgaatttctaccattcagatggtatttagtggccccggtccaggcaaagttactgttgttgttgctgtctatgttttttgacagtctctgctgccgataacagggtccgggcagccagttctttgattgctcggccacggtgttgggcccagcctgatggaactgcagctcccttgtggaccccgtagtgctctgggtccgggccaggtagtacaggtactggtcgatgaggggattcatcagccggtccaggctctggctgtgcgcatagctgctgtggaaaggcacttcctcaaaggtgtagctgaattcaaagttattgcccgttctcagcatctgagaaggaaagtactccaggcagcagaaggaggaacgtcccacagactgactgccgttgtttagagtcagatatccgtactgaggaatcatgaacacgtccgcagggaacggagggaggcagccctggtgcgcagagccgaggacgtacggcagttggtactccgagtccgagaagacctgaatcgtgctggtaaggttattagcgatggtcgtaacgccgtcgttcgtcgtgacctccttgacctggatgttgaacaacttgaaccgcagctttctgggccggaatccccagttgttgttgatgagtcgctgccagtcacgtggtgagaagtggcagtggaatctgttgaagtcaaaatagccccagggggtgctgtagccgaagaagtggttgtcgttggtagccccgctctgacttgatatctgcttgtagaggtggttgttgtaggtgggcagggcccaggtgcgggtgctggtggtgatgactctgtcgcccagccatgtggaatcgcaatgccaatttccggaggcattacccactccgtcggcgccttcgttattgtctgccattggtgcgccaccgcctgcagccattgtaccagatcccagacctgagggcgcggcgggaggttctccgagaggttgggggtcgggcactgactctgagtcgccagtctgcccaaagttgagcttctttttagcgggctgctggcctttcttgccgatgcccgtggaggagtcgggggattctatgggtctcttctttccggaagccgtcttagcgccttcctcaaccagaccgagaggttcgagaacccgcttcttggcctggaagactgctcgcccgaggttgcccccaaaagacgtatcttcttgaagacgctcctgaaactcggcgtcggcgtggttgtacttgaggtacgggttgtccccctgctcgagctgcttgtcgtaggccttgtcgtgctcgagggccgcggcgtctgcctcgttgaccggctctcccttgtcgagtccgttgaagggtccgaggtacttgtagccaggaagcaccagaccccggccgtcgtcctgcttttgctggttggctttgggtttcggggctccaggtttcaagtcccaccactcgcgaatgccctcagagaggttgtcctcgagccaatctggaagataaccatcggcagccatacctggtttaagtcatttattgctcagaaacacagtcatccaggtccacgttgaccagatcgcaggccgagcaagcaatctcgggagcccgccccagcagatgatgaatggcacagagtttccgatacgtcctctttctgacgaccggttgagattctgacacgccggggaaacattctgaacagtctctggtcccgtgcgtgaagcaaatgttgaaattctgattcattctctcgcatgtcttgcagggaaacagcatctgaagcatgcccgcgtgacgagaacatttgttttggtacctgtcggcaaagtccaccggagctccttccgcgtctgacgtcgatggatccgcgactgaggggcaagcccgcttgggctcgcttttatccgcgtcatcgggggcgggtctcttgttggctccaccctttctgacgtagaactcatgcgccacctcggtcacgtgatcctgcgcccagcggaagaactctttgacttcctgctttgtcaccttgccaaagtcatgctccagacggcgggtgagttcaaatttgaacatccggtcttgtaacggctgctggtgctcgaaggtggtgctgttcccgtcaatcacggcgcacatgttggtgttggaagtgacgatcacgggggtgggatcgatctgggcggacgacttgcacttttggtccacgcgcaccttgctgccgccgagaatggccttggcggactccacgaccttggccgtcatcttgccctcctcccaccagatcaccatcttgtcgacgcaatcgttgaagggaaagttctcattggtccagttgacgcagccgaagggcgaattc

SEQ ID NO: 2533 - protein, 728 aa, Artificial Sequence
  Synthetic polypeptide
MAADGYLPDWLEDNLSEGIREWWDLKPGAPKPKANQQKQDDGRGLVLPGYRYLGPFNGLDKGEPVNEADAAALEHDKAYDKQLEQGDNPYLKYNHADAEFQERLQEDTSFGGNLGRAVFQAKKRVLEPLGLVEEGAKTAPGKKRPIESPDSSTGIGKNGQPPAKKKLNFGQTGDSESVPDPQPLGEPPAAPSGLGSGTMAAGGGAPMADNNEGADGVGNASGNWHCDSTWLGDRVITTSTRTWALPTYNNHLYKQISSQSGATNDNHFFGYSTPWGYFDFNRFHCHFSPRDWQRLINNNWGFRPRKLRFKLFNIQVKEVTTNDGVTTIANNLTSTIQVFSDSEYQLPYVLGSAHQGCLPPFPADVFMIPQYGYLTLNNGSQSVGRSSFYCLEYFPSQMLRTGNNFEFSYTFEEVPFHSSYAHSQSLDRLMNPLIDQYLYYLARTQSTTGSTRELQFHQAGPNTMAEQSKNWLPGPCYRQQRLSKNIDSNNNSNFAWTGATKYHLNGRNSLTNPGVAMATNKDDEDQFFPINGVLVFGKTGAANKTTLENVLMTSEEEIKTTNPVATEEYGVVSSNLQSSTAGPQTQTVNSQGALPGMVWQNRDVYLQGPIWAKIPHTDGNFHPSPLMGGFGLKHPPPQILIKNTPVPANPPEVFTPAKFASFITQYSTGQVSVEIEWELQKENSKRWNPEIQYTSNYAKSNNVEFAVNNEGVYTEPRPIGTRYLTRNL

SEQ ID NO: 2534 - protein, 728 aa, Artificial Sequence
  Synthetic polypeptide
MAADGYLPDWLEGNLSEGIREWWDLKPGAPKPKANQQKQDDGRGLVLPGYRYLGPFNGLDKGEPVNEADAAALEHDKAYDKQLEQGDNPYLKYNHADAEFQERLQEDTSFGGNLGRAVFQAKKRVLEPLGLVEEGAKTAPGKKRPIESPDSSTGIGKNGQPPAKKKLNFGQTGDSESVPDPQPLGEPPAAPSGLGSGTMAAGGGAPMADNNEGADGVGNASGNWHCDSTWLGDRVITTSTRTWALPTYNNHLYKQISSQSGATNDNHFFGYSTPWGYFDFNRFHCHFSPRDWQRLINNNWGFRPRKLRFKLFNIQVKEVTTNDGVTTIANNLTSTIQVFSDSEYQLPYVLGSAHQGCLPPFPADVFMIPQYGYLTLNNGSQSVGRSSFYCLEYFPSQMLRTGDNFEFSYTFEEVPFHSSYAHSQSLDRLMNPLIDQYLYYLARTQSTTGSTRELQFHQAGPNTMAEQSKNWLPGPCYRQQRLSKNIDSNNNSNFAWTGATKYHLNGRNSLTNPGVAMATNKDDEDQFFPINGVLVFGKTGAANKTTLENVLMTSEEEIKTTNPVATEEYGVVSSNLQSSTAGPQTQTVNSQGALPGMVWQNRDVYLQGPIWAKIPHTDGNFHPSPLMGGFGLKHPPPQILIKNTPVPANPPEVFTPAKFASFITQYSTGQVSVEIEWELQKENSKRWNPEIQYTSNYAKSNNVEFAVNNEGVYTEPRPIGTRYLTRNL

SEQ ID NO: 2535 - DNA, 3106 bp, Artificial Sequence
  Synthetic polynucleotide
gcggccgcgaattcgcccttcgcagagaccaaagttcaactgaaacgaatcagccggtttattgattaacaagtaattacaggttacgggtgaggtaacgggtgccaatggggcgaggctcagtataaaccccttcgttgttgacagcaaattccacattattagacttggcataatttgaggtgtactgaatctctggattccagcgtttgctgttttctttctgcagttcccactcgatctccacgctgacctggccggtgctgtactgcgtgataaatgaggcaaacttggcaggagtaaacacctctggaggattagcaggtaccggggtgtttttgatgagaatttgaggaggcgggtgtttgagtccaaatccgcccatcaggggagacgggtgaaagttgccgtccgtgtgaggaattttggcccagatgggaccctgcaggtacacgtcccggttctgccagaccatgccgggcagagccccctggctgttgacagtctgtgtctggggtccggccgtagacgattgcaggttgctggagaccacaccgtattcttctgtagccacgggattggtggttttgatctcctcctcgctggtcattagcacgttttccagcgttgtcttgttggcagcccccgttttgccaaaaaccagcactccgttgatgggaaagaactggtcctcgtcgtccttgttggtggccatggctacgcccgggttggttaatgaatttctaccattcagatggtatttagtggccccggtccaggcaaagttactgttgttgttgctgtctatgttttttgacagtctctgctgccgataacagggtccgggcagccagttctttgattgctcggccatggtgttgggcccagcctgatggaactgcagctcccttgtggaccccgtagtgctctgggtccgggccaggtagtacaggtactggtcgatgaggggattcatcagccggtccaggctctggctgtgcgcatagctgctgtggaaaggcacttcctcaaaggtgtagctgaattcaaagttatcgcccgttctcagcatctgagaaggaaagtactccaggcagtagaaggaggaacgtcccacagactgactgccgttgtttagagtcagatatccgtactgaggaatcatgaacacgtccgcagggaacggagggaggcagccctggtgcgcagagccgaggacgtacggcagttggtactccgagtccgagaagacctgaatcgtgctggtaaggttattagcgatggtcgtaacgccgtcgttcgtcgtgacctccttgacctggatgttgaacaacttgaaccgcagctttctgggccggaatccccagttgttgttgatgagtcgctgccagtcacgtggtgagaagtggcagtggaatctgttgaagtcaaaatagccccagggggtgctgtagccgaagaagtggttgtcgttggtagccccgctctgacttgatatctgcttgtagaggtggttgttgtaggtgggcagggcccaggtgcgggtgctggtggtgatgactctgtcgcccagccatgtggaatcgcaatgccaatttccggaggcattacccactccgtcggcgccttcgttattgtctgccattggtgcgccaccgcctgcagccattgtaccagatcccagacctgagggcgcggcgggaggttctccgagaggttgggggtcgggcactgactctgagtcgccagtctgcccaaagttgagcttctttttagcgggcggctggccgttcttgccgatgcccgtggaggagtcgggggattctatgggtctcttctttccaggagccgtcttagcgccttcctcaaccagaccgagaggttcgagaacccgcttcttggcctggaagactgctcgcccgaggttgcccccaaaagacgtatcttcttgaagacgctcctgaaactcggcgtcggcgtggttgtacttgaggtacgggttgtccccctgctcgagctgcttgtcgtaggccttgtcgtgctcgagggccgcggcgtctgcctcgttgaccggctctcccttgtcgagtccgttgaagggtccgaggtacctgtagccaggaagcaccagaccccggccgtcgtcctgcttttgctggttggctttgggtttcggggctccaggtttcaagtcccaccactcgcgaatgccctcagagaggttgccctcgagccaatctggaagataaccatcggcagccatacctggtttaagtcatttattgctcagaaacacagtcatccaggtccacgttggccagatcgcaggccgagcaagcaatctcgggagcccgccccagcagatgatgaatggcacagagtttccgatacgtcctctttctgacgaccggttgagattctgacacgccggggaaacattctgaacagtctctggtcccgtgcgtgaagcaaatgttgaaattctgattcattctctcgcatgtcttgcaggggaacagcatctgaagcatgcccgcgtgacgagaacatttgttttggtacctgtcggcaaagtccaccggagctccttccgcgtctgacgtcgatggatccgcgactgaggggcaggcccgcttgggctcgcttttatccgcgtcatcgggggcgggtctcttgttggctccaccctttctgacgtagaactcatacgccacctcggtcacgtgatcctgcgcccagcggaagaactctttgacttcctgctttgtcaccttgccaaagtcatgctccagacggcgggtgagttcaaatttgaacatccggtcttgtaacggctgctggtgctcgaaggtggtgctgttcccgtcaatcacggcgcacatgttggtgttggaagtgacgatcacgggggtgggatcgatctgggcggacgacttgcacttttggtccacgcgcaccttgctgccgccgagaatggccttggcggactccacgaccttggccgtcatcctgccctcctcccaccagatcaccatcttgtcgacgcaatcgttgaagggaaagttctcattggtccagttgacgcagccgtagaaagggcgaattc

SEQ ID NO: 2536 - protein, 728 aa, Artificial Sequence
  Synthetic polypeptide
MAADGYLPDWLEDNLSEGIREWWDLKPGAPKPKANQQKQDDGRGLVLPGYKYLGPFNGLDKGEPVNEADAAALEHDKAYDKQLEQGDNPYLKYNHADAEFQERLQEDTSFGGNLGRAVFQAKKRVLEPLGLVEEGAKTAPGKKRPIESPDSSTGIGKKGQQPAKKKLNFGQTGDSESVPDPQPLGEPPAAPSGLGSGTMAAGGGAPMADNNEGADGVGNASGNWHCDSTWLGDRVITTSTRTWALPTYNNHLYKQISSQSGATNDNHFFGYSTPWGYFDFNRFHCHFSPRDWQRLINNNWGFRPRKLRFKLFNIQVKEVTTNDGVTTIANNLTSTIQVFSDSEYQLPYVLGSAHQGCLPPFPADVFMIPQYGYLTLNNGSQSMGRSSFYCLEYFPSQMLRTGNNFEFSYTFEEVPFHSSYAHSQSLDRLMNPLIDQYLYYLARTQSTTGSTRELQFHQAGPNTMAEQSKNWLPGPCYRQQRLSKNIDSNNNSNFAWTGATKYHLNGRNSLTNPGVAMATNKDDEGQFFPINGVLVFGKTGAANKTTLENVLMTSEEEIKTTNPVATEEYGVVSSNLQSSTAGPQTQTVNSQGALPGMVWQNRDVYLQGPIWAKIPHTDGNFHPSPLMGGFGLKHPPPQILIKNTPVPANPPGVFTPALFASFITQYSTGQVSVEIEWELQKENSKRWNPEIQYTSNYAKSNNVEFAVNNEGVYTEPRPIGTRYLTRNL

SEQ ID NO: 2537 - DNA, 3098 bp, Artificial Sequence
  Synthetic polynucleotide
gaattcgcccttcgcagagaccaaagttcaactgaaacgaatcaaccggtttattgattaacaagtaattacaggttacgggtgaggtaacgggtgccaatggggcgaggctcagtataaaccccttcgttgttgacagcaaattccacattattagacttggcataatttgaggtgtactgaatctctggattccagcgtttgctgttttctttctgcagttcccactcgatctccacgctgacctggccggtgctgtactgcgtgataaatgaggcaaactaggcaggagtaaacacccctggaggattagcaggtaccggggtgtttttgatgagaatttgaggaggcgggtgtttgagtccaaatccgcccatcaggggagacgggtgaaagttgccgtccgtgtgaggaattttggcccagatgggaccctgcaggtacacgtcccggttctgccagaccatgccgggcagagccccctggctgttgacagtctgtgtctggggtccggccgtagacgattgcaggttgctggagaccacaccgtattcttctgtagccacgggattggtggttttgatctcctcctcgctggtcattagcacgttttccagcgttgtcttgttggcagcccccgttttgccaaaaaccagcactccgttgatgggaaagaactggccctcgtcgtccttgttggtggccatggctacgcccgggttggttaatgaatttctaccattcagatggtatttagtggccccggtccaggcaaagttactgttgttgttgctgtctatgttttttgacagtctctgctgccgataacagggtccgggcagccagttctttgattgctcggccatggtgttgggcccagcctgatggaactgcagctcccttgtggaccccgtagtgctctgggtccgggccaggtagtacaggtactggtcgatgaggggattcatcagccggtccaggctctggctgtgcgcatagctgctgtggaaaggcacttcctcaaaggtgtagctgaattcaaagttattgcccgttctcagcatctgagaaggaaagtactccaggcagtagaaggaggaacgtcccatagactgactgccgttgtttagagtcagatatccgtactgaggaatcatgaacacgtccgcagggaacggagggaggcagccctggtgcgcagagccgaggacgtacggcagttggtactccgagtccgagaagacctgaatcgtgctggtaaggttattagcgatggtcgtaacgccgtcgttcgtcgtgacctccttgacctggatgttgaacaacttgaaccgcagctttctgggccggaatccccagttgttgttgatgagtcgctgccagtcacgtggtgagaagtggcagtggaatctgttgaagtcaaaatagccccagggggtgctgtagccgaagaagtggttgtcgttggtagccccgctctgacttgatatctgcttgtagaggtggttgttgtaggtgggcagggcccaggtgcgggtgctggtggtgatgactctgtcgcccagccatgtggaatcgcaatgccaatttccggaggcattacccactccgtcggcgccttcgttattgtctgccattggtgcgccaccgcctgcagccattgtaccagatcccagacctgagggcgcggcgggaggttctccgagaggttgggggtcgggcactgactctgagtcgccagtctgcccaaagttgagcttctttttagcgggctgctggcctttcttgccgatgcccgtggaggagtcgggggattctatgggtctcttctttccaggagccgtcttagcgccttcctcaaccagaccgagaggttcgagaacccgcttcttggcctggaagactgctcgcccgaggttgcccccaaaagacgtatcttcttgaagacgctcctgaaactcagcgtcggcgtggttgtacttgaggtacgggttgtccccctgctcgagctgcttgtcgtaggccttgtcgtgctcgagggccgcggcgtctgcctcgttgaccggctctcccttgtcgagtccgttgaagggtccgaggtacttgtagccaggaagcaccagaccccggccgtcgtcctgcttttgctggttggctttgggtttcggggctccaggtttcaagtcccaccactcgcgaatgccctcagagaggttgtcctcgagccaatctggaagataaccatcggcagccatacctggtttaagtcatttattgctcagaaacacagtcatccaggtccacgttgaccagatcgcaggccgagcaagcaatctcgggagcccgccccagcagatgatgaatggcacagagtttccgatacgtcctctttctgacgaccggttgagattctgacacgccggggaaacattctgaacagtctctggtcccgtgcgtgaagcaaatgttgaaattctgattcattctctcgcatgtcttgcagggaaacagcatctgaagcatgcccgcgtgacgagaacatttgttttggtacctgtcggcaaagtccaccggagctccttccgcgtctgacgtcgatggatccgcgactgaggggcaggcccgcttgggctcgcttttatccgcgtcatcgggggcgggcctcttgttggctccaccctttctgacgtagaactcatgcgccacctcggtcacgtgatcctgcgcccagcggaagaactctttgacttcctgctttgtcaccttgccaaagtcctgctccagacggcgggtgagttcaaatttgaacatccggtcttgtaacggctgctggtgctcgaaggtggtgctgttcccgtcaatcacggcgcacatgttggtgttggaagtgacgatcacgggggtgggatcgatctgggcggacgacttgcacttttggtccacgcgcaccttgctgccgccgagaatggccttggcggactccacgaccttggccgtcatcttgccctcctcccaccagatcaccatcttgtcgacgcaatcgttgaagggaaagttctcattggtccagttgacgcagccgtagaaagggcgaattc

SEQ ID NO: 2538 - DNA, 2187 bp, Artificial Sequence
  Synthetic polynucleotide
atggctgccgatggttatcttccagattggctcgagggcaacctctctgagggcattcgcgagtggtgggacttgaaacctggagccccgaaacccaaagccaaccagcaaaagcaggacgacggccggggtctggtgcttcctggctacaggtacctcggacccttcaacggactcgacaagggagagccggtcaacgaggcagacgccgcggccctcgagcacgacaaggcctacgacaagcagctcgagcagggggacaacccgtacctcaagtacaaccacgccgacgccgagtttcaggagcgtcttcaagaagatacgtcttttgggggcaacctcgggcgagcagtcttccaggccaagaagcgggttctcgaacctctcggtctggttgaggaaggcgctaagacggctcctggaaagaagagacccatagaatcccccgactcctccacgggcatcggcaagaacggccagccgcccgctaaaaagaagctcaactttgggcagactggcgactcagagtcagtgcccgacccccaacctctcggagaacctcccgccgcgccctcaggtctgggatctggtacaatggctgcaggcggtggcgcaccaatggcagacaataacgaaggcgccgacggagtgggtaatgcctccggaaattggcattgcgattccacatggctgggcgacagagtcatcaccaccagcacccgcacctgggccctgcccacctacaacaaccacctctacaagcagatatcaagtcagagcggggctaccaacgacaaccacttcttcggctacagcaccccctggggctattttgacttcaacagattccactgccacttctcaccacgtgactggcagcgactcatcaacaacaactggggattccggcccagaaagctgcggttcaagttgttcaacatccaggtcaaggaggtcacgacgaacgacggcgttacgaccatcgctaataaccttaccagcacgattcaggtcttctcggactcggagtaccaactgccgtacgtcctcggctctgcgcaccagggctgcctccctccgttccctgcggacgtgttcatgattcctcagtacggatatctgactctaaacaacggcagtcagtctgtgggacgttcctccttctactgcctggagtactttccttctcagatgctgagaacgggcgataactttgaattcagctacacctttgaggaagtgcctttccacagcagctatgcgcacagccagagcctggaccggctgatgaatcccctcatcgaccagtacctgtactacctggcccggacccagagcactacggggtccacaagggagctgcagttccatcaggctgggcccaacaccatggccgagcaatcaaagaactggctgcccggaccctgttatcggcagcagagactgtcaaaaaacatagacagcaacaacaacagtaactttgcctggaccggggccactaaataccatctgaatggtagaaattcattaaccaacccgggcgtagccatggccaccaacaaggacgacgaggaccagttctttcccatcaacggagtgctggtttttggcaaaacgggggctgccaacaagacaacgctggaaaacgtgctaatgaccagcgaggaggagatcaaaaccaccaatcccgtggctacagaagaatacggtgtggtctccagcaacctgcaatcgtctacggccggaccccagacacagactgtcaacagccagggggctctgcccggcatggtctggcagaaccgggacgtgtacctgcagggtcccatctgggccaaaattcctcacacggacggcaactttcacccgtctcccctgatgggcggatttggactcaaacacccgcctcctcaaattctcatcaaaaacaccccggtacctgctaatcctccagaggtgtttactcctgccaagtttgcctcatttatcacgcagtacagcaccggccaggtcagcgtggagatcgagtgggaactgcagaaagaaaacagcaaacgctggaatccagagattcagtacacctcaaattatgccaagtctaataatgtggaatttgctgtcaacaacgaaggggtttatactgagcctcgccccattggcacccgttacctcacccgtaacctgtaa

SEQ ID NO: 2539 - protein, 728 aa, Artificial Sequence; identical to SEQ ID NO: 2534
  Synthetic polypeptide

SEQ ID NO: 2540 - protein, 728 aa, Artificial Sequence
  Synthetic polypeptide
MAADGYLPDWLEDNLSEGIREWWDLKPGAPKPKANQQKQDDGRGLVLPGYRYLGPFNGLDKGEPVNEADAAALEHDKAYDKQLEQGDNPYLKYNHADAEFQERLQEDTSFGGNLGRAVFQAKKRVLEPLGLVEEGAKTAPGKKRPIESPDSSTGIGKNGQPPAKKKLNFGQTGDSESVPDPQPLGEPPAAPSGLGSGTMAAGGGAPMADNNEGADGVGNASGNWHCDSTWLGDRVITTSTRTWALPTYNNHLYKQISSQSGATNDNHFFGYSTPWGYFDFNRFHCHFSPRDWQRLINNNWGFRPRKLRFKLFNIQVKEVTTNDGVTTIANNLTSTIQVFSDSEYQLPYVLGSAHQGCLPPFPADVFMIPQYGYLTLNNGSQSVGRSSFYCLEYFPSQMLRTGDNFEFSYTFEEVPFHSSYAHSQSLDRLMNPLIDQYLYYLARTQSTTGSTRELQFHQAGPNTMAEQSKNWLPGPCYRQQRLSKNIDSNNNSNFAWTGATKYHLNGRNSLTNPGVAMATNKDDEDQFFPINGVLVFGKTGAANKTTLENVLMTSEEEIKTTNPVATEEYGVVSSNLQSSTAGPQTQTVNSQGALPGMVWQNRDVYLQGPIWAKIPHTDGNFHPSPLMGGFGLKHPPPQILIKNTPVPANPPEVFTPAKFASFITQYSTGQVSVEIEWELQKENSKRWNPEIQYTSNYAKSNNVEFAVNNEGVYTEPRPIGTRYLTRNL

SEQ ID NO: 2541 - protein, 728 aa, Artificial Sequence; identical to SEQ ID NO: 2533
  Synthetic polypeptide

SEQ ID NO: 2542 - protein, 728 aa, Artificial Sequence
  Synthetic polypeptide
MAADGYLPDWLEDNLSEGIREWWDLKPGAPKPKANQQKQDDGRGLVLPGYKYLGPFNGLDKGEPVNEADAAALEHDKAYDKQLEQGDNPYLKYNHADAEFQERLQEDTSFGGNLGRAVFQAKKRVLEPLGLVEEGAKTAPGKKRPIESPDSSTGIGKNGQPPAKKKLNFGQTGDSESVPDPQPLGEPPAAPSGLGSGTMAAGGGAPMADNNEGADGVGNASGNWHCDSTWLGDRVITTSTRTWALPTYNNHLYKQISSQSGATNDNHFFGYSTPWGYFDFNRFHCHFSPRDWQRLINNNWGFRPRKLRFKLFNIQVKEVTTNDGVTTIANNLTSTIQVFSDSEYQLPYVLGSAHQGCLPPFPADVFMIPQYGYLTLNNGSQSVGRSSFYCLEYFPSQMLRTGNNFEFSYTFEEVPFHSSYAHSQSLDRLMNPLIDQYLYYLARTQSTTGSTRELQFHQAGPNTMAEQSKNWLPGPCYRQQRLSKNIDSNNNSNFAWTGATKYHLNGRNSLTNPGVAMATNKDDEDQFFPINGVLVFGKTGAANKTTLENVLMTSEEEIKTTNPVATEEYGVVSSNLQSSTAGPQTQTVNSQGALPGMVWQNRDVYLQGPIWAKIPHTDGNFHPSPLMGGFGLKHPPPQILIKNTPVPANPPEVFTPAKFASFITQYSTGQVSVEIEWELQKENSKRWNPEIQYTSNYAKSNNVEFAVNNEGVYTEPRPIGTRYLTRNL

SEQ ID NO: 2543 - protein, 728 aa, Artificial Sequence
  Synthetic polypeptide
MAADGYLPDWLEDNLSEGIREWWDLKPGAPKPKANQQKQDDGRGLVLPGYKYLGPFNGLDKGEPVNEADAAALEHDKAYDKQLEQGDNPYLKYNHADAEFQERLQEDTSFGGNLGRAVFQAKKRVLEPLGLVEEGAKTAPGKKRPIESPDSSTGIGKKGQQPAKKKLNFGQTGDSESVPDPQPLGEPPAAPSGLGSGTMAAGGGAPMADNNEGADGVGNASGNWHCDSTWLGDRVITTSTRTWALPTYNNHLYKQISSQSGATNDNHFFGYSTPWGYFDFNRFHCHFSPRDWQRLINNNWGFRPRKLRFKLFNIQVKEVTTNDGVTTIANNLTSTIQVFSDSEYQLPYVLGSAHQGCLPPFPADVFMIPQYGYLTLNNGSQSVGRSSFYCLEYFPSQMLRTGNNFEFSYTFEEVPFHSSYAHSQSLDRLMNPLIDQYLYYLARTQSTTGSTRELQFHQAGPNTMAEQSKNWLPGPCYRQQRLSKNIDSNNNSNFAWTGATKYHLNGRNSLTNPGVAMATNKDDEDQFFPINGVLVFGKTGAANKTTLENVLMTSEEEIKTTNPVATEEYGVVSSNLQSSTAGPQTQTVNSQGALPGMVWQNRDVYLQGPIWAKIPHTDGNFHPSPLMGGFGLKHPPPQILIKNTPVPANPPEVFTPAKFASFITQYSTGQVSVEIEWELQKENSKRWNPEIQYTSNYAKSNNVEFAVNNEGVYTEPRPIGTRYLTRNL

SEQ ID NO: 2544 - DNA, 2215 bp, Artificial Sequence
  Synthetic polynucleotide
atggctgccgatggttatcttccagattggctcgaggacactctctctgaaggaataagacagtggtggaagctcaaacctggcccaccaccaccaaagcccgcagagcggcataaggacgacagcaggggtcttgtgcttcctgggtacaagtacctcggacccttcaacggactcgacaagggagagccggtcaacgaggcagacgccgcggccctcgagcacgacaaagcctacgaccggcagctcgacagcggagacaacccgtacctcaagtacaaccacgccgacgccgagttccaggagcggctcaaagaagatacgtcttttgggggcaacctcgggcgagcagtcttccaggccaaaaagaggcttcttgaacctcttggtctggttgaggaagcggctaagacggctcctggaaagaagaggcctgtagagcactctcctgtggagccagactcctcctcgggaaccggaaaggcgggccagcagcctgcaagaaaaagattgaattttggtcagactggagacgcagactcagtcccagaccctcaaccaatcggagaacctcccgcagccccctcaggtgtgggatctcttacaatggctgcaggcggtggcgcaccaatggcagacaataacgagggcgccgacggagtgggtaattcctcgggaaattggcattgcgattccacatggatgggcgacagagtcatcaccaccagcacccgaacctgggccctgcccacctacaacaaccacctctacaagcaaatctccaacagcacatctggaggatcttcaaatgacaacgcctacttcggctacagcaccccctgggggtattttgactttaacagattccactgccacttttcaccacgtgactggcagcgactcatcaacaacaactggggattccggcccaagagactcagcttcaagctcttcaacatccaggtcaaggaggtcacgcagaatgaaggcaccaagaccatcgccaataacctcaccagcaccatccaggtgtttacggactcggagtaccagctgccgtacgttctcggctctgcccaccagggctgcctgcctccgttcccggcggacgtgttcatgattccccagtacggctacctaacactcaacaacggtagtcaggccgtgggacgctcctccttctactgcctggaatactttccttcgcagatgctgagaaccggcaacaacttccagtttacttacaccttcgaggacgtgcctttccacagcagctacgcccacagccagagcttggaccggctgatgaatcctctgattgaccagtacctgtactacttgtctcggactcaaacaacaggaggcacgacaaatacgcagactctgggcttcagccaaggtgggcctaatacaatggccaatcaggcaaagaactggctgccaggaccctgttaccgccagcagcgagtatcaaagacatctgcggataacaacaacagtgaatactcgtggactggagctaccaagtaccacctcaatggcagagactctctggtgaatccgggcccggccatggcaagccacaaggacgatgaagaaaagtttttttcctcagagcggggttctcatctttgggaagcaaggctcagagaaaacaaatgtggacattgaaaaggtcatgattacagacgaagaggaaatcaggacaaccaatcccgtggctacggagcagtatggttctgtatctaccaacctccagagaggcaacagacaagcagctaccgcagatgtcaacacacaaggcgttcttccaggcatggtctggcaggacagagatgtgtaccttcaggggcccatctgggcaaagattccacacacggacggacattttcacccctctcccctcatgggtggattcggacttaaacaccctccgcctcagatcctgatcaagaacacgcctgtacctgcggatcctccgaccaccttcaaccagtcaaagctgaactctttcatcacccagtattctactggccaagtcagcgtggagatcgagtgggagctgcagaaggaaaacagcaagcgctggaaccccgagatccagtacacctccaactactacaaatctacaagtgtggactttgctgttaatacagaaggcgtgtactctgaaccccgccccattggcacccgttacctcacccgtaatctgtaa

SEQ ID NO: 2545 - protein, 737 aa, Artificial Sequence
  Synthetic polypeptide
MAADGYLPDWLEDTLSEGIRQWWKLKPGPPPPKPAERHKDDSRGLVLPGYKYLGPFNGLDKGEPVNEADAAALEHDKAYDRQLDSGDNPYLKYNHADAEFQERLKEDTSFGGNLGRAVFQAKKRLLEPLGLVEEAAKTAPGKKRPVEHSPVEPDSSSGTGKAGQQPARKRLNFGQTGDADSVPDPQPIGEPPAAPSGVGSLTMAAGGGAPMADNNEGADGVGNSSGNWHCDSTWMGDRVITTSTRTWALPTYNNHLYKQISNSTSGGSSNDNAYFGYSTPWGYFDFNRFHCHFSPRDWQRLINNNWGFRPKRLSFKLFNIQVKEVTQNEGTKTIANNLTSTIQVFTDSEYQLPYVLGSAHQGCLPPFPADVFMIPQYGYLTLNNGSQAVGRSSFYCLEYFPSQMLKTGNNFQFTYTFEDVPFHSSYAHSQSLDRLMNPLIDQYLYYLSRTQTTGGTTNTQTLGFSQGGPNTMANQAKNWLPGPCYRQQRVSKTSADNNNSEYSWTGATKYHLNGRDSLVNPGPAMASHKDDEEKFFPQSGVLIFGKQGSEKTNVDIEKVMITDEEEIRTTNPVATEQYGSVSTNLQRGNRQAATADVNTQGVLPGMVWQDRDVYLQGPIWAKIPHTDGHFHPSPLMGGFGLKHPPPQILIKNTPVPADPPTTFNQSKLNSFITQYSTGQVSVEIEWELQKENSKRWNPEIQYTSNYYKSTSVDFAVNTEGVYSEPRPIGTRYLTRNL

SEQ ID NO: 2546 - protein, 737 aa, Artificial Sequence
  Synthetic polypeptide
MAADGYLPDWLEDTLSEGIRQWWKLKPGPPPPKPAERHKDDSRGLVLPGYKYLGPFNGLDKGEPVNEADAAALEHDKAYDRQLDSGDNPYLKYNHADAEFQERLKEDTSFGGNLGRAVFQAKKRLLEPLGLVEEAAKTAPGKKRPVEHSPVEPDSSSGTGKAGQQPARKRLNFGQTGDADSVPDPQPIGEPPAAPSGVGSLTMAAGGGAPMADNNEGADGVGNSSGNWHCDSTWMGDRVITTSTRTWALPTYNNHLYKQISNSTSGGSSNDNAYFGYSTPWGYFDFNRFHCHFSPRDWQRLINNNWGFRPKRLSFKLFNIQVKEVTQNEGTKTIANNLTSTIQVFTDSEYQLPYVLGSAHQGCLPPFPADVFMIPQYGYLTLNNGSQAVGRSSFYCLEYFPSQMLKTGNNFQFTYTFEDVPFHSSYAHSQSLDRLMNPLIDQYLYYLSRTQTTGGTTNTQTLGFSQGGPNTMANQAKNWLPGPCYRQQRVSKTSADNNNSEYSWTGATKYHLNGRDSLVNPGPAMASHKDDEEKFFPQSGVLIFGKQGSEKTNVDIEKVMITDEEEIRTTNPVATEQYGSVSTNLQQGNTQAATADVNTQGVLPGMVWQDRDVYLQGPIWAKIPHTDGHFHPSPLMGGFGLKHPPPQILIKNTPVPADPPTTFNQSKLNSFITQYSTGQVSVEIEWELQKENSKRWNPEIQYTSNYYKSTSVDFAVNTEGVYSEPRPIGTRYLTRNL

SEQ ID NO: 2547 - protein, 737 aa, Artificial Sequence
  Synthetic polypeptide
MAADGYLPDWLEDTLSEGIRQWWKLKPGPPPPKPAERHKDDSRGLVLPGYKYLGPFNGLDKGEPVNEADAAALEHDKAYDRQLDSGDNPYLKYNHADAEFQERLKEDTSFGGNLGRAVFQAKKRLLEPLGLVEEAAKTAPGKKRPVEHSPVEPDSSSGTGKAGQQPARKRLNFGQTGDADSVPDPQPIGEPPAAPSGVGSLTMAAGGGAPMADNNEGADGVGNSSGNWHCDSTWMGDRVITTSTRTWALPTYNNHLYKQISNSTSGGSSNDNAYFGYSTPWGYFDFNRFHCHFSPRDWQRLINNNWGFRPKRLSFKLFNIQVKEVTQNEGTKTIANNLTSTIQVFTDSEYQLPYVLGSAHQGCLPPFPADVFMIPQYGYLTLNNGSQAVGRSSFYCLEYFPSQMLRTGNNFQFTYTFEDVPFHSSYAHSQSLDRLMNPLIDQYLYYLSRTQTTGGTTNTQTLGFSQGGPNTMANQAKNWLPGPCYRQQRVSKTSADNNNSEYSWTGATKYHLNGRDSLVNPGPAMASHKDDEEKFFPQSGVLIFGKQGSEKTNVDIEKVMITDEEEIRTTNPVATEQYGSVSTNLQQGNTQAATADVNTQGVLPGMVWQDRDVYLQGPIWAKIPHTDGHFHPSPLMGGFGLKHPPPQILIKNTPVPADPPTTFNQSKLNSFITQYSTGQVSVEIEWELQKENSKRWNPEIQYTSNYYKSTSVDFAVNTEGVYSEPRPIGTRYLTRNL

SEQ ID NO: 2548 - protein, 729 aa, Artificial Sequence
  Synthetic polypeptide
MAADGYLPDWLEDNLSEGIREWWDLKPGAPKPKANQQKQDDGRGLVLPGYKYLGPFNGLDKGEPVNAADAAALEHDKAYDQQLKAGDNPYLRYNHADAEFQERLQEDTSFGGNLGRAVFQAKKRVLEPLGLVEEGAKTAPGKKRPIDSPDSSTGIGKKGQQPAKKKLNFGQTGDSESVPDPQPLGEPPAAPSSVGSGTMAAGGGAPTADNNEGADGVGNASGNWHCDSTWLGDRVITTSTRTWALPTYNNHLYKQISSSSSGATNDNHYFGYSTPWGYFDFNRFHCHFSPRDWQRLINNNWGFRPKKLRFKLFNIQVKEVTTNDGVTTIANNLTSTVQVFSDSEYQLPYVLGSAHQGCLPPFPADVFMIPQYGYLTLNNGSQSVGRSSFYCLEYFPSQMLRTGNNFEFSYSFEDVPFHSSYAHSQSLDRLMNPLIDQYLYYLARTQSTTGSTRELQFHQAGPNTMAEQSKNWLPGPCYRQQRLSKNLDFNNNSNFAWTAATKYHLNGRNSLTNPGIPMATNKDDEDQFFPINGVLVFGKTGAANKTTLENVLMTSEEEIKTTNPVATEEYGVVSSNLQSSTAGPQSQTINSQGALPGMVWQNRDVYLQGPIWAKIPHTDGNFHPSPLMGGFGLEHPPPQILIKNTPVPANPPEVFTPAKFASFITQYSTGQVSVEIEWELQKENSKRWNPEIQYTSNYAKSNNVEFAVNPDGVYTEPRPIGTRYLTRNL

SEQ ID NO: 2549 - DNA, 3075 bp, Artificial Sequence
  Synthetic polynucleotide
tgagaactttcctttcaacgattgcgtcggacaagatggtgatctggtgggaggaggggaagatgaccgccaaggtcgtggagtcggccaaagccattcttggaggaagcaaggtgcgtgtggaccagaaatgcaagtcctcggcccagatagacccgactcccgtgatcgtcacctccaacaccaacatgtgcgccgtgattgacgggaactcaacgaccttcgagcaccagcagccgttgcaagaccggatgttcaaatttgaacttacccgccgtctggatcatgactttggaaaggtcaccaagcaggaagtgaaagactttttccggtgggcaaaggatcacgtggttgaggtggagcatgaattctacgtcaaaaagggtggagctaagaaaagacccgcccccagtgacgcagatataagtgagcccaaacgggcgcgcgagtcagttgcgcagccatcaacgtcagacgcggaagcttcgatcaactacgcggacaggtaccaaaaacaaatgttctcgtcacgtgggcatgaatctgatgctgtttccctgcagacaatgcgagagaatgaatcagaattcaaatatctgcttcactcacggacagaaagactgtttagagtgctttcccgtgtcagaatctcaacccgtttctgtcgtcaaaaaggcgtatcagaaactgtgctacattcatcatatcatgggaaaggtgccagacgcttgcactgcctgcgatctggtcaatgtggatttggatgactgcatctctgaacaataaatgatttaaatcaggtatggctgccgatggttatcctccagattggctcgaggacactctctctgaagggataagacagtggtggaagctcaaacctggcccaccaccaccaaagcccgcagagcggcataaggacgacagcaggggtcttgtgcttcctgggtacaagtacctcggacccttcaacggactcgacaagggggagccggtcaacgaggcagacgccgcggccctcgagcacgacaaggcctacgaccggcagctcgacagcggagacaacccgtacctcaagtacaaccacgccgacgcagagtttcaggagcgccttaaagaagatacgtcttttgggggcaacctcggacgagcagtcttccaggcgaaaaagagggttcttgaacctctgggcctggttgaggaacctgttaagacggctccgggaaaaaagaggccggtagagcactctcctgtggagccagactcctcctcgggaaccggaaaagcgggccagcggcctgcaagaaaaagattaaattttggtcagactggagacgcagactccgtacctgacccccagcctctcggacagccaccagcagccccctctggtctgggatctactacaatggctacaggcagtggcgcaccaatggcagacaataacgagggtgccgatggagtgggtaattcctcaggaaattggcattgcgattcccaatggctgggcgacagagtcatcaccaccagcacccgaacctgggccctgcccacatacaacaaccacctctacaagcaaatctccagccaatcaggagccagcaacgacaaccactactttggctacagcaccccctgggggtattttgacttcaacagattccactgccacttttcaccacgtgactggcaaagactcatcaacaacaactggggattccggcccaaaagactcaacttcaagctctttaatattcaagtcaaagaggtcacgcagaatgacggtacgacgacgattgccaataaccttaccagcacggttcaggtgtttactgactcggagtaccagctcccgtacgtcctgggctcggcgcatcaaggatgcctcccgccgtttccagcggacgtcttcatggtcccacagtatggatacctcaccctgaacaacgggagtcaggcggtaggacgctcttccttttactgcctggagtactttccttctcagatgctgcgtactggaaacaactttcagttcagctacacttttgaagacgtgcctttccacagcagctacgctcacagccagagtctggatcggctgatgaatcctctgatcgaccagtacctgtattatctgaacaagacacaaacaaatagtggaactcttcagcagtctcggctactgtttagccaagctggaccaaccaacatgtctcttcaagctaaaaactggctgcctggaccttgctacagacagcagcgtctgtcaaaacaggcaaacgacaacaacaacagcaactttccctggactgcagctacaaagtatcatctaaatggccgggactcgttggttaatccaggaccagctatggccagtcacaaggatgacgaagaaaagtttttccccatgcatggaaccctgatatttggtaaacaaggaacaaatgccaacgacgcggatttggaaaatgtcatgattacagatgaagaagaaatcagggccaccaatcccgtggctacggagcagtacgggactgtgtcaaataatttgcaaaactcaaacactggtccaactactggaactgtcaatcgccaaggagcgttacctggtatggtgtggcaggatcgagacgtgtacctgcagggacccatttgggccaagattcctcacaccgatggacactttcatccttctccactgatgggaggttttggactcaaacacccgcctcctcagatcatgatcaaaaacactcccgttccagccaatcctcccacaaacttcagttctgccaagtttgcttctttcatcacacagtattccacgggacaggtcagcgtggagatcgagtgggagctgcagaaggagaacagcaaacgctggaatcccgaaattcagtacacttccaactacaacaagtctgttaatgtggactttactgtggacactaatggtgtgtattcagagcctcgccccattggcaccagatacctgactcgtaatctgtaattgcttgttaatcaataaaccgtttaattcgtttcagttgaactttggtctctgcgaagggcgaa

SEQ ID NO: 2550 - DNA, 3142 bp, Artificial Sequence
  Synthetic polynucleotide
aaaacgacgggccagtgattgtaatacgactcactatagggcgaaattgaaattagcggccgcgaattcgcctttcgcagagaccaaagttcaactgaaacgaattaaacggtttattgattaacaagcaattacagattacgagtcaggtatctggtgccaatggggcgaggctctgaatacacaccattagtgtccacagtaaagtccacattaacagacttgttgtagttggaagtgtactgaatttcgggattccagcgtttgctgttctccttctgcagctcccactcgatctccacgctgacctgtcccgtggaatactgtgtgatgaaagaagcaaacttggcagaactgaagtttgtgggaggattggctggaacgggagtgtttttgatcatgatctgaggaggcgggtgtttgagtccaaaacctcccatcagtggagaaggatgaaagtgtccatcggtgtgaggaatcttggcccaaatgggtccctgcaggtacacgtctcgatcctgccacaccataccaggtaacgctccttggtgattgacagttccagtagttggaccagtgtttgagttttgcaaattatttgacacagtcccgtactgctccgtagccacgggattggtggccctgatttcttcttcatctgtaatcatgacattttccaaatccgcgtcgttggcatttgttccttgtttaccaaatatcagggttccatgcatggggaaaaacttttcttcgtcatccttgtgactggccatagctggtcctggattaaccaacgagtcccggccatttagatgatactttgtagctgcagtccagggaaagttgctgttgttgttgtcgtttgcctgttttgacagacgctgctgtctgtagcaaggtccaggcagccagtttttagcttgaagagacatgttggttggtccagcttggctaaacagtagccgagactgctgaagagttccactatttgtttgtgtcttgttcagataatacaggtactggtcgatcagaggattcatcagccgatccagactctggctgtgagcgtagctgctgtggaaaggcacgtcttcaaaagtgtagctgaactgaaagttgtttccagtacgcagcatctgagaaggaaagtactccaggcagtaaaaggaagagcgtcctaccgcctgactcccgttgttcagggtgaggtatccatactgtgggaccatgaagacgtccgctggaaacggcgggaggcatccttgatgcgccgagcccaggacgtacgggagctggtactccgagtcagtaaacacctgaaccgtgctggtaaggttattggcaatcgtcgtcgtaccgtcattctgcgtgacctctttgacttgaatattaaagagcttgaagttgagtcttttgggccggaatccccggttgttgttgacgagtctttgccagtcacgtggtgaaaagtggcagtggaatctgttgaagtcaaaatacccccagggggtgctgtagccaaagtagtggttgtcgttgctggctcctgattggctggagatttgcttgtagaggtggttgttgtatgtgggcagggcccaggttcgggtgctggtggtgatgactctgtcgcccagccattgggaatcgcaatgccaatttcctgaggaattacccactccatcggcaccctcgttattgtctgccattggtgcgccactgcctgtagccattgtagtagatcccagaccagagggggctgctggtggctgtccgagaggctgggggtcaggtacggagtctgcgtctccagtctgaccaaaatttaatctttttcttgcaggctgctggcccgcttttccggttcccgaggaggagtctggctccacaggagagtgctctaccggcctcttttttcccggagccgtcttaacaggctcctcaaccaggcccagaggttcaagaaccctctttttcgcctggaagactgctcgtccgaggttgcccccaaaagacgtatcttctttaaggcgctcctgaaactctgcgtcggcgtggttgtacttgaggtacgggttgtctccgctgtcgagctgccggtcgtaggccttgtcgtgctcgagggccgcggcgtctgcctcgttgaccggctcccccttgtcgagtccgttgaagggtccgaggtacttgtacccaggaagcacaagacccctgctgtcgtccttatgccgctctgcgggctttggtggtggtgggccaggtttgagcttccaccactgtcttattccttcagagagagtgtcctcgagccaatctggaagataaccatcggcagccatacctgatttaaatcatttattgttcagagatgcagtcatccaaatccacattgaccagatcgcaggcagtgcaagcgtctggcacctttcccatgatatgatgaatgtagcacagtttctgatacgcctttttgacgacagaaacgggttgagattctgacacgggaaagcactctaaacagtctttctgtccgtgagtgaagcagatatttgaattctgattcattctctcgcattgtctgcagggaaacagcatcagattcatgcccacgtgacgagaacatttgttttggtacctgtccgcgtagttgatcgaagcttccgcgtctgacgtcgatggctgcgcaactgactcgcgcgcccgtttgggctcacttatatctgcgtcactgggggcgggtcttttcttagctccaccctttttgacgtagaattcatgctccacctcaaccacgtgatcctttgcccaccggaaaaagtctttcacttcctgcttggtgacctttccaaagtcatgatccagacggcgggtaagttcaaatttgaacatccggtcttgcaacggctgctggtgctcgaaggtcgttgagttcccgtcaatcacggcgcacatgttggtgttggaggtgacgatcacgggagtcgggtctatctgggccgaggacttgcatttctggtccacacgcaccttgcttcctccaagaatggctttggccgactccacgaccttggcggtcatcttcccctcctcccaccagatcaccatcttgtcgacgcaatggtaaaaggaaagttctcattgg

SEQ ID NO: 2551 - protein, 735 aa, Adeno-associated virus-2
MAADGYLPDWLEDTLSEGIRQWWKLKPGPPPPKPAERHKDDSRGLVLPGYKYLGPFNGLDKGEPVNEADAAALEHDKAYDRQLDSGDNPYLKYNHADAEFQERLKEDTSFGGNLGRAVFQAKKRVLEPLGLVEEPVKTAPGKKRPVEHSPVEPDSSSGTGKAGQQPARKRLNFGQTGDADSVPDPQPLGEPPATPAAVGPTTMASGGGAPMADNNEGADGVGNASGNWHCDSTWLGDRVITTSTRTWALPTYNNHLYKQISSASTGASNDNHYFGYSTPWGYFDFNRFHCHFSPRDWQRLINNNWGFRPKRLNFKLFNIQVKEVTQNDGTTTIANNLTSTVQVFTDSEYQLPYVLGSAHQGCLPPFPADVFMIPQYGYLTLNNGSQAVGRSSFYCLEYFPSQMLRTGNNFTFSYTFEDVPFHSSYAHSQSLDRLMNPLIDQYLYYLNRTQNQSGSAQDKALLFSRGSPAGMSVQPKNWLPGPCYRQQRVSKTKTDNNNSNFTWTGASKYNLNGRESIINPGTAMASHKDDKDKFFPMSGVMIFGKESAGASNTALDNVMITDEEEIKATNPVATERFGTVAVNFQSSSTDPATGDVHVMGALPGMVWQDRDVYLQGPIWAKIPHTDGHFHPSPLMGGFGLKHPPPQILIKNTPVPANPPAEFSATKFASFITQYSTGQVSVEIEWELQKENSKRWNPEVQYTSNYAKSANVDFTVDNNGLYTEPRPIGTRYLTRP

SEQ ID NO: 2552 - protein, 740 aa, Adeno-associated virus-2
MAADGYLPDWLEDTLSEGIRQWWKLKPGPPPPKPAERHKDDSRGLVLPGYKYLGPFNGLDKGEPVNAADAAALEHDKAYDRQLDSGDNPYLKYNHADAEFQERLKEDTSFGGNLGRAVFQAKKRVLEPLGLVEEPVKTAPGKKRPVEHSPVEPDSSSGTGKAGQQPARKRLNFGQTGDADSVPDPQPLGQPPAAPSGLGTNTMATGSGAPMADNNEGADGVGNSSGNWHCDSTWMGDRVITTSTRTWALPTYNNHLYKQISSQSGASNDNHYFGYSTPWGYFDFNRFHCHFSPRDWQRLINNNWGFRPKRLNFKLFNIQVKEVTQNDGTTTIANNLTSTVQVFTDSEYQLPYVLGSAHQGCLPPFPADVFMVPQYGYLTLNNGSQAVGRSSFYCLEYFPSQMLRTGNNFTFSYTFEDVPFHSSYAHSQSLDRLMNPLIDQYLYYLSRTNTPSGTTTQSGLQFSQAGASDIRDQSRNWLPGPCYRQQRVSKTSADNNNSEYSWTGATKYHLNGRDSLVNPGPAMASHKDDEEKFFPQSGVLIFGKQGSEKTNVDIEKVMITDEEEIRTTNPVATEQYGSVSTNLQRGNRQAATADVNTQGVLPGMVWQDRDVYLQGPIWAKIPHTDGHFHPSPLMGGFGLKHPPPQILIKNTPVPANPSTTFSAAKFASFITQYSTGQVSVEIEWELQKENSKRWNPEIQYTSNYNKSVNVDFTVDTNGVYSEPRPIGTRYLTRNLLLAAA

SEQ ID NO: 2553 - protein, 734 aa, Adeno-associated virus-2
MAADGYLPDWLEDTLSEGIRQWWKLKPGPPPPKPAERHKDDSRGLVLPGYKYLGPFNGLDKGEPVNEADAAALEHDKAYDRQLDSGDNPYLKYNHADAEFQERLKEDTSFGGNLGRAVFQAKKRVLEPLGLVEEPVKTAPGKKRPVEHSPVEPDSSSGTGKAGQQPARKRLNFGQTGDADSVPDPQPLGQPPAAPSGLGTNTMATGSGAPMADNNEGADGVGNSSGNWHCDSTWMGDRVITTSTRTWALPTYNNHLYKQISSQSGASNDNHYFGYSTPWGYFDFNRFHCHFSPRDWQRLINNNWGFRPKRLNFKLFNIQVKEVTQNDGTTTIANNLTSTVQVFTDSEYQLPYVLGSAHQGCLPPFPADVFMVPQYGYLTLNNGSQAVGRSSFYCLEYFPSQMLRTGNNFTFSYTFEDVPFHSSYAHSQSLDRLMNPLIDQYLYYLSRTNTPSGTTTQSGLQFSQAGASDIRDQSRNWLPGPCYRQQRVSKTSADNNNSEYSWTGATMYHLNGRDSLVNPGPAMASHKDDEEKFFPQSGVLIFGKQGSEKTNVDIEKVMITDEEEIRTTNPVATEQYGSVSTNLQRGNRQAATADVNTQGVLPGMVWQDRDVYLQGPIWAKIPHTDGHFHPSPLMGGFGLKHPPPQILIKNTPVPANPSTTFSAAKFASFITQYSTGQVSVEIEWELQKENSKRWNPEIQYTSNYNKSINVDFTVDTNGVYSEPRPIGTRYLTRN

SEQ ID NO: 2554 - protein, 734 aa, Adeno-associated virus-2
MAADGYLPDWLEDTLSEGIRQWWKLKPGPPPPKPAERHKDDSRGLVLPGYKYLGPFNGLDKGEPVNEADAAALEHDKAYDRQLDSGDNPYLKYNHADAEFQERLKEDTSFGGNLGRAVFQAKKRVLEPLGLVEEPVKTAPGKKRPVEHSPVEPDSSSGTGKAGQQPARKRLNFGQTGDADSVPDPQPLGQPPAAPSGLGTNTMATGSGAPMADNNEGADGVGNSSGNWHCDSTWMGDRVITTSTRTWALPTYNNHLYKQISSQSGASNDNHYFGYSTPWGYFDFNRFHCHFSPRDWQRLINNNWGFRPKRLNFKLFNIQVKEVTQNDGTTTIANNLTSTVQVFTDSEYQLPYVLGSAHQGCLPPFPADVFMVPQYGYLTLNNGSQAVGRSSFYCLEYFPSQMLRTGNNFTFSYTFEDVPFHSSYAHSQSLDRLMNPLIDQYLYYLSRTNTPSGTTTQSGLQFSQAGASDIRDQSRNWLPGPCYRQQRVSKTSADNNNSEYSWTGATKYHLNGRDSLVNPGPAMASHKDDEEKFFPQSGVLIFGKQGSEKTNVDIEKVMITDEEEIRTTNPVATEQYGSVSTNLQRGNRQAATADVNTQGVLPGMVWQDRDVYLQGPIWAKIPHTDGHFHPSPLMGGFGLKHPPPQILIKNTPVPANPSTTFSEAKFASFITQYSTGQVSVEIEWELQKENSKRWNPEIQYTSNYNKSVNVDFTVDTNGVYSEPRPIGTRYLTRN

SEQ ID NO: 2555 - protein, 739 aa, Adeno-associated virus-2
MAADGYLPDWLEDTLSEGIRQWWKLKPGPPPPKPAERHKDDSRGLVLPGYKYLGPFNGLDKGEPVNEADAAALEHDKAYDRQLDSGDNPYLKYNHADAEFQERLKEDTSFGGNLGRAVFQAKKRVLEPLGLVEEPVKTAPGKKRPVEHSPVEPDSSSGTGKAGQQPARKRLNFGQTGDADSVPDPQPLGQPPAAPSGLGTNTMATGSGAPMADNNEGADGVGNSSGNWHCDSTWMGDRVITTSTRTWALPTYNNHLYKQISSQSGASNDNHYFGYSTPWGYFDFNRFHCHFSPRDWQRLINNNWGFRPKRLNFKLFNIQVKEVTQNDGTTTIANNLTSTVQVFTDSEYQLPYVLGSAHQGCLPPFPADVFMVPQYGYLTLNNGSQAVGRSSFYCLEYFPSQMLRTGNNFTFSYTFEDVPFHSSYAHSQSLDRLMNPLIDQYLYYLSRTNTPSGTTTQSGLQFSQAGASDIRDQSRNWLPGPCYRQQRVSKTSADNNNSEYSWTGATKYHLNGRDSLVNPGPAMASHKDDEEKFFPQSGVLIFGKQGSEKTNVDIEKVMITDEEEIRTTNPVATEQYGSVSTNLQRGNRQAATADVNTQGVLPGMVWQDRDVYLQGPIWAKIPHTDGHFHPSPLMGGFGLKHPPPQILIKNTPVPANPSTTFSAAKFASFITQYSTGQVSVEIEWELQKENSKRWNPEIQYTSNYNKSVNVDFTVDTNGVYSEPRPIGTRYLTRNLLLAA

SEQ ID NO: 2556 - protein, 725 aa, Adeno-associated virus-2
MAADGYLPDWLEDTLSEGIRQWWKLKPGPPPPKPAERHKDDSRGLVLPGYKYLGPFNGLDKGEPVNEADAAALEHDKAYDRQLDSGDNPYLKYNHADAEFQERLKEDTSFGGNLGRAVFQAKKRVLEPLGLVEEPVKTAPGKKRPVEHSPVEPDSSSGTGKAGQQPARKRLNFGQTGDADSVPDPQPLGQPPAAPSGLGTNTMATGSGAPMADNNEGADGVGNSSGNWHCDSTWMGDRVITTSTRTWALPTYNNHLYKQISSQSGASNDNHYFGYSTPWGYFDFNRFHCHFSPRDWQRLINNNWGFRPKRLNFKLFNIQVKEVTQNDGTTTIANNLTSTVQVFTDSEYQLPYVLGSAHQGCLPPFPADVFMVPQYGYLTLNNGSQAVGRSSFYCLEYFPSQMLRTGNNFTFSYTFEDVPFHSSYAHSQSLDRLMNPLIDQYLYYLSRTNTPSGTTTQSGLQFSQAGASDIRDQSRNWLPGPCYRQQRVSKTSADNNNSEYSWTGATKYHLNGRDSLVNPGPAMASHKDDEEKFFPQSGVLIFGKQGSEKTNVDIEKVMITDEEEIRTTNPVATEQYGSVSTNLQRGNRQAATADVNTQGVLPGMVWQDRDVYLQGPIWAKIPHTDGHFHPSPLMGGFGLKHPPPQILIKNTPVPANPSTTFSAAKFASFITQYSTGQVSVEIEWELQKENSKRWNPEIQYTSNYNKSVNVDFTVDTNGVYSEPRP

SEQ ID NO: 2557 - protein, 707 aa, Adeno-associated virus-2
MAADGYLPDWLEDTLSEGIRQWWKLKPGPPPPKPAERHKDDSRGLVLPGYKYLGPFNGLDKGEPVNEADAAALEHDKAYDRQLDSGDNPYLKYNHADAEFQERLKEDTSFGGNLGRAVFQAKKRVLEPLGLVEEPVKTAPGKKRPVEHSPVEPDSSSGTGKAGQQPARKRLNFGQTGDADSVPDPQPLGQPPAAPSGLGTNTMATGSGAPMADNNEGADGVGNSSGNWHCDSTWMGDRVITTSTRTWALPTYNNHLYKQISSQSGASNDNHYFGYSTPWGYFDFNRFHCHFSPRDWQRLINNNWGFRPKRLNFKLFNIQVKEVTQNDGTTTIANNLTSTVQVFTDSEYQLPYVLGSAHQGCLPPFPADVFMVPQYGYLTLNNGSQAVGRSSFYCLEYFPSQMLRTGNNFTFSYTFEDVPFHSSYAHSQSLDRLMNPLIDQYLYYLSRTNTPSGTTTQSGLQFSQAGASDIRDQSRNWLPGPCYRQQRVSKTSADNNNSEYSWTGATKYHLNGRDSLVNPGPAMASHKDDEEKFFPQSGVLIFGKQGSEKTNVDIEKVMITDEEEIRTTNPVATEQYGSCIYQPPERQQTSSYRRCQHTRRSSRHGLAGQRCVPSGAHLGKDSTHGRTFSPLSPHGWIRTTPSSTDSHQEHPGTCESFDHLQCGKVCFLHHTVLHGTGQRGDRVRAAEGKQQTLESRNSVHFQLQQVC

SEQ ID NO: 2558 - protein, 739 aa, Adeno-associated virus-2; identical to SEQ ID NO: 2555

SEQ ID NO: 2559 - protein, 737 aa, Adeno-associated virus-2
MASDGYLPDWLEDNLSEGIREWWDLKPGAPKPKANQQKQDDGRGLVLPGYKYLGPFNGLDKGEPVNAADAAALEHDKAYDQQLKAGDNPYLRYNHADAEFQERLQEDTSFGGNLGRAVFQAKKRVLEPFGLVEEGAKTAPGKKRPVEQSPQEPDSSSGIGKTGQQPAKKRLNFGQTGDSESVPDPQPLGEPPATPAAVGPTTMASGGGAPMADNNEGADGVGNASGNWHCDSTWLGDRVITTSTRTWALPTYNNHLYKQISSASTGASNDNHYFGYSTPWGYFDFNRFHCHFSPRDWQRLINNNWGFRPKRLNFKLFNIQVKEVTTNDGTTTIANNLTSTVQVFTDSEYQLPYVLGSAHQGCLPPFPADVFMVPQYGYLTLNNGSQAVGRSSFYCLEYFPSQMLRTGNNFTFSYTFEDVPFHSSYAHSQSLDRLMNPLIDQYLYYLSRTNTPSGTTTQSGLQFSQAGASDIRDQSRNWLPGPCYRQQRVSKTSADNNNSEYSWTGATKYHLNGRDSLVNPGPAMASHKDDEEKFFPQSGVLIFGKQGSEKTNVDIEKVMITDEEEIRTTNPVATEQYGSVSTNLQRGNRQAATADVNTQGVLPGMVWQDRDVYLQGPIWAKIPHTDGHFHPSPLMGGFGLKHHPPQILIKNTPVPANPSTTFSAAKFASFITQYSTGQVSVEIEWELQKENSKRWNPEIQYTSNYNKSVNVDFTVDTNGVYSEPRPIGTRYLTRNLL

SEQ ID NO: 2560 - protein, 741 aa, Adeno-associated virus-2
MAADGYLPDWLEDTLSEGIREWWALKPGAPKPKANQQKQDDGRGLVLPGYKYLGPFNGLDKGEPVNEADAAALEHDKAYDQQLQAGDNPYLRYNHADAEFQERLQEDTSFGGNLGRAVFQAKKRVLEPLGLVEEPVKTAPGKKRPVEHSPVEPDSSSGTGKSGQQPARKRLNFGQTGDADSVPDPQPLGQPPAAPSGLGTNTMATGSGAPMADNNEGADGVGNSSGNWHCDSTWMGDRVITTSTRTWALPTYNNHLYKQISSQSGASNDNHYFGYSTPWGYFDFNRFHCHFSPRDWQRLINNNWGFRPKRLNFKLFNIQVKEVTQNDGTTTIANNLTSTVQVFTDSEYQLPYVLGSAHQGCLPPFPADVFMVPQYGYLTLNNGSQAVGRSSFYCLEYFPSQMLRTGNNFTFSYTFEDVPFHSSYAHSQSLDRLMNPLIDQYLYYLSRTNTPSGTTTQSGLQFSQAGASDIRDQSRNWLPGPCYRQQRVSKTSADNNNSEYSWTGATKYHLNGRDSLVNPGPAMASHKDDEEKFFPQSGVLIFGKQGSEKTNVDIEKVMITDEEEIRTTNPVATEQYGSVSTNLQRGNLANHNNTTNARQAATADVNTQGVLPGMVWQDRDVYLQGPIWAKIPHTDGHFHPSPLMGGFGLKHPPPQILIKNTPVPANPSTTFSAAKFASFITQYSTGQVSVEIEWELQKENSKRWNPEIQYTSNYNKSINVDFTVDTNGVYSEPRPIGTRYL

SEQ ID NO: 2561 - protein, 730 aa, Adeno-associated virus-2
MASDGYLPDWLEDNLSEGIREWWDLKPGAPKPKANQQKQDDGRGLVLPGYKYLGPFNGLDKGEPVNAADAAALEHDKAYDQQLKAGDNPYLRYNHADAEFQERLQEDTSFGGNLGRAVFQAKKRVLEPFGLVEEGAKTAPGKKRPVEQSPQEPDSSSGIGKTGQQPAKKRLNFGQTGDSESVPDPQPLGEPPATPAAVGPTTMASGGGAPMADNNEGADGVGNASGNWHCDSTWLGDRVITTSTRTWALPTYNNHLYKQISSASTGASNDNHYFGYSTPWGYFDFNRFHCHFSPRDWQRLINNNWGFRPKRLNFKLFNIQVKEVTTNDGVTTIANNLTSTVQVFSDSEYQLPYVLGSAHQGCLPPFPADVFMIPQYGYLTLNNGSQAVGRSSFYCLEYFPSQMLRTGNNFTFSYTFEDVPFHSSYAHSQSLDRLMNPLIDQYLYYLNRTQNQSGSAQNNDLLFSRGSPAGMSVQPKNWLPGPCYRQQRVSKTKTDNNNSNFTWTGASKYNLNGRESIINPGTAMASHKDDKDKFFPMSGVMIFGKESAGASNTALDNVMITDEEEIKATNPVATERFGTVAVNLQSSSTDPATGDVHVMGALPGMVWQDRDVYLQGPIWAKIPHTDGHFHPSPLMGGFGLKNPPPQILIKNTPVPANPPAEFSATKFASFITQYSTGQVSVEIEWELQKENSKRWNPEVQYTSNYAKSANVDFTVDNNGLYTEPRPIGTR

SEQ ID NO: 2562 - protein, 735 aa, Adeno-associated virus-2
  MOD_RES (239)..(239): Any naturally occurring amino acid
MASDGYLPDWLEDNLSEGIREWWDLKPGAPKPKANQQKQDDGRGLVLPGYKYLGPFNGLDKGEPVNAADAAALEHDKAYDQQLKAGDNPYLRYNHADAEFQERLQEDTSFGGNLGRAVFQAKKRVLEPFGLVEEGAKTAPGKKRPVEQSPQEPDSSSGIGKTGQQPAKKRLNFGQTGDSESVPDPQPLGEPPATPAAVGPTTMASGGGAPMADNNEGADGVGNASGNWHCDSTWLGDRXITTSTRTWALPTYNNHLYKQISSASTGASNDNHYFGYSTPWGYFDFNRFHCHFSPRDWQRLINNNWGFRPKRLNFKLFNIQVKEVTTNDGVTTIANNLTSTVQVFSDSEYQLPYVLGSAHQGCLPPFPADVFMIPQYGYLTLNNGSQAVGRSSFYCLEYFPSQMLRTGNNFTFSYTFEDVPFHSSYAHSQSLDRLMNPLIDQYLYYLNRTQNQSGSAQNNDLLFSRGSPAGMSVQPKNWLPGPCYRQQRVSKTKTDNNNSNFTWTGASKYNLNGRESIINPGTAMASHKDDKDKFFPMSGVMIFGKESAGASNTALDNVMITDEEEIKATNPVATERFGTVAVNLQSSSTDPATGDVHVMGALPGMVWQDRDVYLQGPIWAKIPHTDGHFHPSPLMGGFGLKNPPPQILIKNTPVPANPPAEFSATKFASFITQYSTGQVSVEIEWELQKENSKRWNPEVQYTSNYAKSANVDFTVDNNGLYTEPRPIGTRYLTRP

SEQ ID NO: 2563 - protein, 733 aa, Adeno-associated virus-2
MASDGYLPDWLEDNLSEGIREWWDLKPGAPKPKANQQKQDDGRGLVLPGYKYLGPFNGLDKGEPVNAADAAALEHDKAYDQQLKAGDNPYLRYNHADAEFQERLQEDTSFGGNLGRAVFLAKKRVLEPFGLVEEGAKTAPGKKRPVEQSPQEPDSSSGIGKTGQQPAKKRLNFGQTGDSESVPDPQPLGEPPATPAAVGPTTMASGGGAPMADNNEGADGVGNASGNWHCDSTWLGDRVITTSTRTWALPTYNNHLYKQISSASTGASNDNHYFGYSTPWGYFDFNRFHCHFSPRDWQRLINNNWGFRPKRLNFKLFNIQVKEVTTNDGVTTIANNLTSTVQVFSDSEYQLPYVLGSAHQGCLPPFPADVFMIPQYGYLTLNNGSQAVGRSSFYCLEYFPSQMLRTGNNFTFSYTFEDVPFHSSYAHSQSLDRLMNPLIDQYLYYLNRTQNQSGSAQNNDLLFSRGSPAGMSVQPKNWLPGPCYRQQRVSKTKTDNNNSNFTWTGASKYNLNGRESIINPGTAMASHKDDKDKFFPMSGVMIFGKESAGASNTALDNVMITDEEEIKATNPVATERFGTVAVNLQSSSTDPATGDVHVMGALPGMVWQDRDVYLQGPIWAKIPHTDGHFHPSPLMGGFGLKNPPPQILIKNTPVPANPPAEFSATKFASFITQYSTGQVSVEIEWELQKENSKRWNPEVQYTSNYAKSANVDFTVDNNGLYTEPRPIGTRYLT

SEQ ID NO: 2564 - protein, 734 aa, Adeno-associated virus-2
MAADGYLPDWLEDTLSEGIRQWWKLKPGPPPPKPAERHKDDSRGLVLPGCKYLGPFNGLDKGEPVNEADAAALEHDKAYDRQLDSGDNPYLKYNHADAEFQERLKEDTSFGGNLGRAVFQAKKRVLEPLGLVEEPVKTAPGKKRPVEHSPVEPDSSSGTGKAGQQPARKRLNFGQTGDADSVPDPQPLGQPPAAPSGLGTNTMATGSGAPMADNNEGADGVGNSSGNWHCDSTWMGDRVITTSTRTWALPTYNNHLYKQISSQSGASNDNHYFGYSTPWGYFDFNRFHCHFSPRDWQRLINNNWGFRPKRLNFKLFNIQVKEVTQNDGTTTIANNLTSTVQVFSDSEYQLPYVLGSAHQGCLPPFPADVFMIPQYGYLTLNNGSQAVGRSSFYCLEYFPSQMLRTGNNFTFNYTFEDVPFHSSYAHSQSLDRLMNPLIDQYLYYLNRTQNQSGSAQNNDLLFSRGSPAGMSVQPKNWLPGPCYRQQRVSKTKTDNNNSNFTWTGASKYNLNGRESIINPGTAMASHKDDKDKFFPMSGVMIFGKESAGASNTALDNVMITDEEEIKATNPVATERFGTVAVNLQSSSTDPATGDVHVMGALPGMVWQDRDVYLQGPIWAKIPHTDGHFHPSPLMGGFGLKNPPPQILIKNTPVPANPPAEFSATKFASFITQYSTGQVSVEIEWELQKENSKRWNPEVQYTSNYAKSANVDFTVDNNGLYTEPRPIGTRYLTRP

SEQ ID NO: 2565 - protein, 734 aa, Adeno-associated virus-2
MAADGYLPDWLEDTLSEGIRQWWKLKPGPPPPKPAERHKDDSRGLVLPGYKYLGPFNGLDKGEPVNEADAAALEHDKAYDRQLDSGDNPYLKYNHADAEFQERLKEDTSFGGNLGRAVFQAKKRVLEPLGLVEEPVKTAPGKKRPVEHSPVEPDSSSGTGKAGQQPARKRLNFGQTGDADSVPDPQPLGQPPAAPSGLGTNTMATGSGAPMADNNEGADGVGNSSGNWHCDSTWMGDRVITTSTRTWALSTYNNHLYKQISSQSGASNDNHYFGYSTPWGYFDFNRFHCHFSPRDWQRLINNNWGFRPKRLNFKLFNIQVKEVTQNDGTTTIANNLTSTVQVFTDSEYQLPYVLGSAHQGCLPPFPADVFMVPQYGYLTLNNGSQAVGRSSFYCLEYFPSQMLRTGNNFTFSYTFEDVPFHSSYAHSQSLDRLMNPLIDQYLYYLSRTNTPSGTTTQSRLQFSQAGASDIRDQSRNWLPGPCYRQQRVSKTSADNNNSEYSWTGATKYHLNGRDSLVNPGPAMASHKDDEEKFFPQSGVLIFGKQGSEKTNVDIEKVMITDEEEIRTTNPVATEQYGSVSTNLQRGNRQAATADVNTQGVLPGMVWQDRDVYLQGPIWAKIPHTDGHFHPSPLMGGFGLKHPPPQILIKNTPVPANPSTTFSAAKFASFITQYSTGQVSVEIEWELQKENSKRWNPEIQYTSNYNKSINVDFTVDTNGVYSEPRPIGTRYLTRN

SEQ ID NO: 2566 - protein, 738 aa, Adeno-associated virus-2
MAADGYLPDWLEDTLSEGIRQWWKLKPGPPPPKPAERHKDDSRGLVLPGYKYLGPFNGLDKGEPVNEADAAALEHDKAYDRQLDGGDNPYLKYNHADAEFQERLKEDTSFGGNLGRAVFQAKKRVLEPLGLVEEPVKTAPGKKRPVEHSPVEPDSSSGTGKAGQQPARKRLNFGQTGDADSVPDPQPLGQPPAAPSGLGTNTMATGSGAPMADNNEGADGVGNSSGNWHCDSTWMGDRVITTSTRTWALPTYNNHLYKQISSQSGASNDNHYFGYSTPWGYFDFNRFHCHFSPRDWQRLINNNWGFRPKRLNFKLFNIQVKEVTQNDGTTTIANNLTSTVQVFTDSEYQLPYVLGSAHQGCLPPFPADVFMVPQYGYLTLNNGSQAVGRSSFYCLEYFPSQMLRTGNNFTFSYTFEDVPFHSSYAHSQSLDRLMNPLIDQYLYYLSRTNTPSGTTTQSGLQFSQAGASDIRDQSRNWLPGPCYRQQRVSKTSADNNNSEYSWTGATKYHLNGRDSLVNPGPAMASHKDDEEKFFPQSGVLIFGKQGSEKTNVDIEKVMITDEEEIRTTNPVATEQYGSVSTNLQRGNRQAATADVNTQGVLPGMVWQDRDVYLQGPIWAKIPHTDGHFHPSPLMGGFGLKHPPPQILIKNTPVPANPSTTFSAAKFASFITQYSTGQVSVEIEWELQKENSKRWNPEIQYTSNYNKSVNVDFTVDTNGVYSEPRPIGTRYLTRNLLRP

SEQ ID NO: 2567 - DNA, 2208 bp, Artificial Sequence
  Synthetic polynucleotide
atggctgccgatggttatcttccagattggctcgaggacactctctctgaaggaataagacagtggtggaagctcaaacctggcccaccaccaccaaagcccgcagagcggcataaggacgacagcaggggtcttgtgcttcctgggtacaagtacctcggacccttcaacggactcgacaagggggagccggtcaacgaggcagacgccgcggccctcgagcacgacaaggcctacgaccggcagctcgacagcggagacaacccgtacctcaagtacaaccacgccgacgcagagtttcaggagcgccttaaagaagatacgtcttttgggggcaacctcggacgagcagtcttccaggcgaaaaagagggttcttgaacctctgggcctggttgaggaacctgttaagacggctccgggaaaaaagaggccggtagagcactctcctgtggagccagactcctcctcgggaaccggaaaagcgggccagcagcctgcaagaaaaagattaaattttggtcagactggagacgcagactccgtacctgacccccagcctctcggacagccaccagcagccccctctggtctgggatctactacaatggctacaggcagtggcgcaccaatggcagacaataacgagggtgccgatggagtgggtaattcctcaggaaattggcattgcgattcccaatggctgggcgacagagtcatcaccaccagcacccgaacctgggccctgcccacatacaacaaccacctctacaagcaaatctccagccaatcaggagccagcaacgacaaccactactttggctacagcaccccctgggggtattttgacttcaacagattccactgccacttttcaccacgtgactggcaaagactcatcaacaacaactggggattccggcccaaaagactcaacttcaagctctttaatattcaagtcaaagaggtcacgcagaatggcggtacgacgacgattgccaataaccttaccagcacggttcaggtgtttactgactcggagtaccagctcccgtacgtcctgggctcggcgcatcaaggatgcctcccgccgtttccagcggacgtcttcatggtcccacagtatggatacctcaccctgaacaacgggagtcaggcggtaggacgctcttccttttactgcctggagtactttccttctcagatgctgcgtactggaaacaactttcagttcagctacacttttgaagacgtgcctttccacagcagctacgctcacagccagagtctggatcggctgatgaatcctctgatcgaccagtacctgtattatctgaacaagacacaaacaaatagtggaactcttcagcagtctcggctactgtttagccaagctggaccaaccaacatgtctcttcaagctaaaaactggctgcctggaccttgctacagacagcagcgtctgtcaaaacaggcaaacggcaacaacaacagcaactttccctggactgcagctacaaagtatcatctaaatggccgggactcgttggttaatccaggaccagctatggccagtcacaaggatgacgaagaaaagtttttccccatgcatggaaccctgatatttggtaaacaaggaacaaatgccaacgacgcggatttggaaaatgtcatgattacagatgaagaagaaatcagggccaccaatcccgtggctacggagcagtacgggactgtgtcaaataatttgcaaaactcaaacactggtccaactactggaactgtcaatcaccaaggagcgttacctggtatggtgtggcaggatcgagacgtgtacctgcagggacccatttgggccaagattcctcacaccgatggacactttcatccttctccactgacgggaggttttggactcaaacacccgcctcctcagatcatgatcaaaaacactcccgttccagccaatcctcccacaaacttcagttctgccaagtttgcttctttcatcacacagtattccacgggacaggtcagcgtggagatcgagtgggagctgcagaaggagaacagcaaacgctggaatcccgaaattcagtacacttccaactacaacaagtctgttaatgtggactttactgtggacactaatggtgtgtattcagagcctcgccccattggcaccagatacctgactcgtaatctgtaa

SEQ ID NO: 2568 - protein, 735 aa, Artificial Sequence
  Synthetic polypeptide
MAADGYLPDWLEDTLSEGIRQWWKLKPGPPPPKPAERHKDDSRGLVLPGYKYLGPFNGLDKGEPVNEADAAALEHDKAYDRQLDSGDNPYLKYNHADAEFQERLKEDTSFGGNLGRAVFQAKKRVLEPLGLVEEPVKTAPGKKRPVEHSPVEPDSSSGTGKAGQQPARKRLNFGQTGDADSVPDPQPLGQPPAAPSGLGSTTMATGSGAPMADNNEGADGVGNSSGNWHCDSQWLGDRVITTSTRTWALPTYNNHLYKQISSQSGASNDNHYFGYSTPWGYFDFNRFHCHFSPRDWQRLINNNWGFRPKRLNFKLFNIQVKEVTQNGGTTTIANNLTSTVQVFTDSEYQLPYVLGSAHQGCLPPFPADVFMVPQYGYLTLNNGSQAVGRSSFYCLEYFPSQMLRTGNNFQFSYTFEDVPFHSSYAHSQSLDRLMNPLIDQYLYYLNKTQTNSGTLQQSRLLFSQAGPTNMSLQAKNWLPGPCYRQQRLSKQANGNNNSNFPWTAATKYHLNGRDSLVNPGPAMASHKDDEEKFFPMHGTLIFGKQGTNANDADLENVMITDEEEIRATNPVATEQYGTVSNNLQNSNTGPTTGTVNHQGALPGMVWQDRDVYLQGPIWAKIPHTDGHFHPSPLTGGFGLKHPPPQIMIKNTPVPANPPTNFSSAKFASFITQYSTGQVSVEIEWELQKENSKRWNPEIQYTSNYNKSVNVDFTVDTNGVYSEPRPIGTRYLTRNL

SEQ ID NO: 2569 - DNA, 2208 bp, Artificial Sequence
  Synthetic polynucleotide
atggctgccgatggttatcttccagattggctcgaggacactctctctgaaggaataagacagtggtggaagctcaaacctggcccaccaccaccaaagctcgcagagcggcatcaggacgacagcaggggtcttgtgcttcctgggtacaagtacctcggacccttcaacggactcgacaaaggagagccggtcaacgaggcagacgccgcggccctcgagcacgacaaggcctacgaccggcagctcgacagcggagacaacccgtacctcaagtacaaccacgccgacgcggagtttcaggagcgtcttaaagaagatacgtcttttgggggcaacctcggacgagcagtcttccaggcgaaaaagagggttcttgaacctctgggcctggttgaggaacctgttaagacggctccgggaaaaaagaggccggtagagcactctcctgtggagccagactcctcctcgggaaccggaaaggcgggccatcagcctgcgagaaagagattgaattttggtcagactggagacgcagactccgtacctgacccccagcctctcggacagccaccagcagcccccacaagtctgggatctactacaatggctacaggcagtggcgcaccaatggcagacaataacgagggtgccgatggagtgggtaattcctcaggaaattggcattgcgattcccaatggctgggcgacagagtcatcaccaccagcacccgaacctgggccctgcccacctacaacaaccacctctacaagcaaatctccagccaatcaggagcctcgaacgacaaccactactttggctacagcaccccctgggggtattttgacttcaacagattccactgtcacttctccccacgtgattggcaaagactcatcaacaacaactggggattccgacccaagagactcaacttcaagctctttaacattcaagtcaaagaggtcacgcagaatgacggtacgacgacgattgccaataaccttaccagcacggttcaggtgtttactgactcggagtaccagctcccgtacgtcctcggctcggcgcatcaaggatgcctcccgccgtttccagcggacgtcttcacggtcccacagtatggatacctcaccctgaacaacgggagtcaggcggtaggacgctcttccttttactgcctggagtactttccttctcagatgctgcgtactggaaacaaccttaccttcagctacacctttgaggacgttcctttccacagcagctacgctcacagccagagtttggaccggctgatgaatcctctgatcgaccagtatctatattatctgaacaggacacaatcaaatagtggaactcttcagcagtctaggctactgtttagccaagctggacccaccagcatgtctcttcaagctaaaaactggctgcctggaccttgctacagacagcagcgtctttcaaagcaggcaaacgacaacaacaacagcaactttccctggactgcggctacaaagtatcatctaaatggccgggactcgttggttaatccaggaccagctatggccagccacaaagacgatgaagaaaagtttttccccatgcatggaaccctgatatttggtaaacaaggaacaaatgctaacgacgcggatttggagcatgttatgattacagatgaagaagaaatcaggaccaccaatcctgtggctacagagcagtacggaaacgtgtcaaataatttgcaaaactcaaatactggtccaactacagaaaatgtcaatcaccagggagcgttacctggtatggtgtggcaggatcgagacgtgtacctgcagggacccatttgggccaagattcctcacaccgacggacactttcacccttctccactgatgggaggttttggactcaaacacccgcctcctcaaatcatgatcaaaaacactcccgttccagccaatcctcccacaaactacagttctgccaagtttgcttctttcatcacacagtattccacgggccaggtcagcgtggagattgagtgggagctgcggaaggagaacagcaaacgctggaaccccgagatccagtatacttccaactacaacaaatctgttaatgtggactttactgtggacactaatggtgtgtattcagagcctcgccccattggcaccagatacctgactcgtaatctgtaa

SEQ ID NO: 2570 - protein, 735 aa, Artificial Sequence
  Synthetic polypeptide
MAADGYLPDWLEDTLSEGIRQWWKLKPGPPPPKLAERHQDDSRGLVLPGYKYLGPFNGLDKGEPVNEADAAALEHDKAYDRQLDSGDNPYLKYNHADAEFQERLKEDTSFGGNLGRAVFQAKKRVLEPLGLVEEPVKTAPGKKRPVEHSPVEPDSSSGTGKAGHQPARKRLNFGQTGDADSVPDPQPLGQPPAAPTSLGSTTMATGSGAPMADNNEGADGVGNSSGNWHCDSQWLGDRVITTSTRTWALPTYNNHLYKQISSQSGASNDNHYFGYSTPWGYFDFNRFHCHFSPRDWQRLINNNWGFRPKRLNFKLFNIQVKEVTQNDGTTTIANNLTSTVQVFTDSEYQLPYVLGSAHQGCLPPFPADVFTVPQYGYLTLNNGSQAVGRSSFYCLEYFPSQMLRTGNNLTFSYTFEDVPFHSSYAHSQSLDRLMNPLIDQYLYYLNRTQSNSGTLQQSRLLFSQAGPTSMSLQAKNWLPGPCYRQQRLSKQANDNNNSNFPWTAATKYHLNGRDSLVNPGPAMASHKDDEEKFFPMHGTLIFGKQGTNANDADLEHVMITDEEEIRTTNPVATEQYGNVSNNLQNSNTGPTTENVNHQGALPGMVWQDRDVYLQGPIWAKIPHTDGHFHPSPLMGGFGLKHPPPQIMIKNTPVPANPPTNYSSAKFASFITQYSTGQVSVEIEWELRKENSKRWNPEIQYTSNYNKSVNVDFTVDTNGVYSEPRPIGTRYLTRNL

SEQ ID NO: 2571 - DNA, 2208 bp, Artificial Sequence
  Synthetic polynucleotide
atggctgccgatggttatcttccagattggctcgaggacactctctctgaaggaataagacagtggtggaagctcaaacctggcccaccaccaccaaagcccgcagagcggcatcaggacgacagcaggggtcttgtgcttcctgggtacaagtacctcggacccttcaacggactcgacaaaggagagccggtcaacgaggcagacgccgcggccctcgagcacgacaaggcctacgaccggcagctcgacagcggagacaacccgtacctcaagtacaaccacgccgacgcggagtttcaggagcgtcttaaagaagatacgtcttttgggggcaacctcggacgagcagtcttccaggcgaaaaagagggttcttgaacctctgggcctggttgaggaacctgttaagacggctccgggaaaaaagaggccggtagagcactctcctgtggagccagactcctcctcgggaaccggaaaagcgggccatcagcctgcgagaaagagattgaattttggtcagactggagacgcagactccgtacctgacccccagcctctcggacagccaccagcagcccccacaagtttgggatctactacaatggctacaggcagtggcgcaccaatggcagacaataacgagggtgccgatggagtgggtaattcctcaggaaattggcattgcgattcccaatggctgggcgacagagtcatcaccaccagcacccgaacctgggccctgcccacctacaacaaccacctctacaagcaaatctccagccaatcaggagcctcgaacgacaaccactactttggctacagcaccccctgggggtattttgacttcaacagattccactgtcacttctccccacgtgattggcaaagactcatcaacaacaactggggattccgacccaagagactcaacttcaagctctttaacattcaagtcaaggaggtcacgcagaatgacggtacgacgacgattgccaataaccttaccagcacggttcaggtgtttactgactcggagtaccagctcccgtacgtcctcggctcggcgcatcaaggatgcctcccgccgtttccagcggacgtcttcatggtcccacagtatggatacctcaccctgaacaacgggagtcaggcggtaggacgctcttccttttactgcctggagtactttccttctcagatgctgcgtactggaaacaactttaccttcagctacacctttgaggacgttcctttccacagcagctacgctcacagccagagtttggaccggctgatgaatcctctgatcgaccagtatctatattatctgaacaggacacaatcaaatagtggaactcttcagcagtctaggctactgtttagccaagctggacccaccagcatgtctcttcaagctaaaaactggctgcctggaccttgctacagacagcagcgtctttcaaagcaggcaaacgacaacaacaacagcaactttccctggactgcggctacaaagtatcgtctaaatggccgggactcgttggttaatccaggaccagctatggccagccacaaagacgatgaagaaaagtttttccccatgcatggaaccctgatatttggtaaacaaggaacaaatgctaacgacgcggatttggagcatgttatgattacagatgaagaagaaatcaggaccaccaatcctgtggctacagagcagtacggaaacgtgtcaaataatttgcaaaactcaaatactggtccaactacagaaaatgtcaatcaccagggagcgttacctggtatggtgtggcaggatcgagacgtgtacctgcagggacccatttgggccaagattcctcacaccgacggacactttcacccttctccactgatgggaggttttggactcaaacacccgcctcctcaaatcatgatcaaaaacactcccgttccagccaatcctcccacaaacttcagttctgccaagtttgcttctttcatcacacagtattccacgggccaggtcagcgtggagattgagtgggagctgcagaaggagaacagcaaacgctggaaccccgagatccagtatacttccaactacaacaaatctgttaatgtggactttactgtggacactaatggtgtgtattcagagcctcgccccattggcaccagatacctgactcgtaatctgtaa

SEQ ID NO: 2572 - protein, 735 aa, Artificial Sequence
  Synthetic polypeptide
MAADGYLPDWLEDTLSEGIRQWWKLKPGPPPPKPAERHQDDSRGLVLPGYKYLGPFNGLDKGEPVNEADAAALEHDKAYDRQLDSGDNPYLKYNHADAEFQERLKEDTSFGGNLGRAVFQAKKRVLEPLGLVEEPVKTAPGKKRPVEHSPVEPDSSSGTGKAGHQPARKRLNFGQTGDADSVPDPQPLGQPPAAPTSLGSTTMATGSGAPMADNNEGADGVGNSSGNWHCDSQWLGDRVITTSTRTWALPTYNNHLYKQISSQSGASNDNHYFGYSTPWGYFDFNRFHCHFSPRDWQRLINNNWGFRPKRLNFKLFNIQVKEVTQNDGTTTIANNLTSTVQVFTDSEYQLPYVLGSAHQGCLPPFPADVFMVPQYGYLTLNNGSQAVGRSSFYCLEYFPSQMLRTGNNFTFSYTFEDVPFHSSYAHSQSLDRLMNPLIDQYLYYLNRTQSNSGTLQQSRLLFSQAGPTSMSLQAKNWLPGPCYRQQRLSKQANDNNNSNFPWTAATKYRLNGRDSLVNPGPAMASHKDDEEKFFPMHGTLIFGKQGTNANDADLEHVMITDEEEIRTTNPVATEQYGNVSNNLQNSNTGPTTENVNHQGALPGMVWQDRDVYLQGPIWAKIPHTDGHFHPSPLMGGFGLKHPPPQIMIKNTPVPANPPTNFSSAKFASFITQYSTGQVSVEIEWELQKENSKRWNPEIQYTSNYNKSVNVDFTVDTNGVYSEPRPIGTRYLTRNL

SEQ ID NO: 2573 - DNA, 2208 bp, Artificial Sequence
  Synthetic polynucleotide
atggctgccgatggttatcttccagattggctcgaggacactctctctgaaggaataagacagtggtggaagctcaaacctggcccaccaccaccaaagcccgcagagcggcatcaggacgacagcaggggtcttgtgcttcctgggtacaagtacctcggacccttcaacggactcgacaaaggagagccggtcaacgaggcagacgccgcggccctcgagcacgacaaggcctacgaccggcagctcgacagcggagacaacccgtacctcaagtacaaccacgccgacgcggagtttcaggagcgtcttaaagaagatacgtcttttgggggcaacctcggacgagcagtcttccaggcgaaaaagagggttcttgaacctctgggcctggttgaggaacctgttaagacggctccgggaaaaaagaggccggtagagcactctcctgtggagccagactcctcctcgggaaccggaaaagcgggccatcagcctgcgagaaagagattgaattttggtcagactggagacgcagactccgtacctgacccccagcctctcggacagccaccagcagcccccacaagtttgggatctactacaatggctacaggcagtggcgcaccaatggcagacaataacgagggtgccgatggagtgggtaattcctcaggaaattggcattgcgattcccaatggctgggcgacagagtcatcaccaccagcacccgaacctgggccctgcccacctacaacaaccacctctacaagcaaatctccagccaatcaggagcctcgaacgacaaccactactttggctacagcaccccctgggggtattttgacttcaacagattccactgtcacttctccccacgtgattggcaaagactcatcaacaacaactggggattccgacccaagagactcaacttcaagctctttaacattcaagtcaaagaggtcacgcagaatgacggtacgacgacgattgccaataaccttaccagcacggttcaggtgtttactgactcggagtaccagctcccgtacgtcctcggctcggcgcatcaaggatgcctcccgccgtttccagcggacgtcttcatggtcccacagtatggatacctcaccctgaacaacgggagtcaggcggtaggacgcccttccttttactgcctggagtactttccttctcagatgctgcgtactggaaacaactttaccttcagctacacctttgaggacgttcctttccacagcagctacgctcacagccagagtttggaccggctgatgaatcctctgatcgaccagtatctatattatctgaacaggacacaatcaaatagtggaactcttcagcagtctaggctactgtttagccaagctggacccaccagcatgtctcttcaagctaaaaactggctgcctggaccttgctacagacagcagcgtctttcaaagcaggcaaacgacaacaacaacagcaactttccctggactgcggctacaaagtatcatctaaatggccgggactcgttggttaatccaggaccagctatggccagccacaaagacgatgaagaaaagtttttccccatgcatgggaccctgatatttggtaaacaaggaacaaatgctaacgacgcggatttggagcatgttatgattacagatgaagaagaaatcaggaccaccaatcctgtggctacagagcagtacggaaacgtgtcaaataatttgcaaaactcaaatactggtccaactacagaaaatgtcaatcaccagggagcgttacctggtatggtgtggcaggatcgagacgtgtacctgcagggacccatttgggccaagattcctcacaccgacggacactttcacccttctccactgatgggaggttttggactcaaacacccgcctcctcaaatcatgatcaaaaacactcccgttccagccaatcctcccacaaacttcagttctgccaagtttgcttctttcatcacacagtattccacgggccaggtcagcgtggagattgagtgggagctgcagaaggagaacagcaaacgctggaaccccgagatccagtatacttccaactacaacaaatctgttaatgtggactttactgtggacactaatggtgtgtattcagagcctcgccccattggcaccagatacctgactcgtaatctgtaa

SEQ ID NO: 2574 - protein, 735 aa, Artificial Sequence
  Synthetic polypeptide
MAADGYLPDWLEDTLSEGIRQWWKLKPGPPPPKPAERHQDDSRGLVLPGYKYLGPFNGLDKGEPVNEADAAALEHDKAYDRQLDSGDNPYLKYNHADAEFQERLKEDTSFGGNLGRAVFQAKKRVLEPLGLVEEPVKTAPGKKRPVEHSPVEPDSSSGTGKAGHQPARKRLNFGQTGDADSVPDPQPLGQPPAAPTSLGSTTMATGSGAPMADNNEGADGVGNSSGNWHCDSQWLGDRVITTSTRTWALPTYNNHLYKQISSQSGASNDNHYFGYSTPWGYFDFNRFHCHFSPRDWQRLINNNWGFRPKRLNFKLFNIQVKEVTQNDGTTTIANNLTSTVQVFTDSEYQLPYVLGSAHQGCLPPFPADVFMVPQYGYLTLNNGSQAVGRPSFYCLEYFPSQMLRTGNNFTFSYTFEDVPFHSSYAHSQSLDRLMNPLIDQYLYYLNRTQSNSGTLQQSRLLFSQAGPTSMSLQAKNWLPGPCYRQQRLSKQANDNNNSNFPWTAATKYHLNGRDSLVNPGPAMASHKDDEEKFFPMHGTLIFGKQGTNANDADLEHVMITDEEEIRTTNPVATEQYGNVSNNLQNSNTGPTTENVNHQGALPGMVWQDRDVYLQGPIWAKIPHTDGHFHPSPLMGGFGLKHPPPQIMIKNTPVPANPPTNFSSAKFASFITQYSTGQVSVEIEWELQKENSKRWNPEIQYTSNYNKSVNVDFTVDTNGVYSEPRPIGTRYLTRNL

SEQ ID NO: 2575 - DNA, 2208 bp, Artificial Sequence
  Synthetic polynucleotide
atggctgccgatggttatcttccagattggctcgaggacactctctctgaaggaataagacagtggtggaagctcaaacctggcccaccaccaccaaagcccgcagagcggcataaggacgacagcaggggtcttgtgcttcctgggtacaagtacctcggacccttcaacggactcgacaagggagagccggtcaacgaggcagacgccgcggccctcgagcacgacaaggcctacgaccggcagctcgacagcggagacaacccgtacctcaagtacaaccacgccgacgcggagtttcaggagcgccttaaagaagatacgtcttttgggggcaacctcggacgagcagtcttccaggcaaaaaagagggttcttgaacctctgggcctggttgaggagcctgttaaaacggctccgggaaaaaagaggccggtagagcactctcctgcggagccagactcctcctcgggaaccggaaaagcgggccagcagcctgcaagaaaaagattgaatttcggtcagactggagacgcagactccgtacctgacccccagcctctcggacagccaccagcagccccctctggtctgggaactaatacgatggcttcaggcagtggcgcaccaatggcagacaataacgagggcgccgacggagtgggtaattcctcgggaaattggcattgcgattccacatggatgggcgacagagtcatcaccaccagcacccgaacttgggccctgcccacctacaacaaccatctctacaagcaaatctccagccaatcaggagccagcaacgacaaccactactttggctacagcaccccttgggggtattttgacttcaacagattccactgccacttttcaccacgtgactggcaaagactcatcaacaacaactggggattccggcccaagagactcaacttcaagctctttaacattcaagtcaaagaggtcacgcagaatgacggtacgacgacgattgccaataaccttaccagcacggttcaggtgtttactgactcggagtaccagctcccgtacgtcctcggctcggcgcatcaaggatgcctcccgccgttcccagcagacgtcttcatggtgccacagtatggatacctcaccctgaacaacgggagtcaggcagtaggacgctcttcattttactgcctggagtactttccttctcagatgctgcgtaccggaaacaactttaccttcagctacacctttgaggacgttcctttccacagcagctacgctcacagccagagtttggaccgtctcatgaatcctctcatcgaccagtacctgtattacttgagcagaacaaacactccaagcggaaccaccacgcagtccaggcttcagttttctcaggccggagcaagtgacattcgggaccagtctaggaactggcttcctggaccctgttaccgccagcagcgagtatcaaagacatctgcggataacaacaacagtgaatactcgtggactggagctaccaagtaccacctcaatggcagagactctctggtgaatccgggcccggccatggccagccacaaggacgatgaagaaaagttttttcctcagagcggggttctcatctttgggaagcaaggctcagagaaaacaaatgtggacattgaaaaggtcatgattacagacgaagaggaaatcaggaccaccaatcccgtggctacggagcagtatggttctgtatctaccaacctgcagggcggcaacacacaagcagctaccgcagatgtcaacacacaaggcgttcttccaggcatggtctggcaggacagagacgtgtacctgcaggggcccatctgggcaaagattccacacacggacggacattttcacccctctcccctcatgggcggattcggacttaaacaccctcctccacagattctcatcaagaacaccccggtacctgcgaatccttcgaccaccttcagtgcggcaaagtttgcttctttcatcacacagtattccacggggcaggtcagcgtggagatcgagtgggagctgcagaaggagaacagcaaacgctggaatcccgagatccagtacacttccaactacaacaaatctgttaatgtggactttactgttgacactaatggcgtgtattcagagcctcgccccattggcaccagatacctgactcgtaatctgtaa

SEQ ID NO: 2576 - protein, 735 aa, Artificial Sequence
  Synthetic polypeptide
MAADGYLPDWLEDTLSEGIRQWWKLKPGPPPPKPAERHKDDSRGLVLPGYKYLGPFNGLDKGEPVNEADAAALEHDKAYDRQLDSGDNPYLKYNHADAEFQERLKEDTSFGGNLGRAVFQAKKRVLEPLGLVEEPVKTAPGKKRPVEHSPAEPDSSSGTGKAGQQPARKRLNFGQTGDADSVPDPQPLGQPPAAPSGLGTNTMASGSGAPMADNNEGADGVGNSSGNWHCDSTWMGDRVITTSTRTWALPTYNNHLYKQISSQSGASNDNHYFGYSTPWGYFDFNRFHCHFSPRDWQRLINNNWGFRPKRLNFKLFNIQVKEVTQNDGTTTIANNLTSTVQVFTDSEYQLPYVLGSAHQGCLPPFPADVFMVPQYGYLTLNNGSQAVGRSSFYCLEYFPSQMLRTGNNFTFSYTFEDVPFHSSYAHSQSLDRLMNPLIDQYLYYLSRTNTPSGTTTQSRLQFSQAGASDIRDQSRNWLPGPCYRQQRVSKTSADNNNSEYSWTGATKYHLNGRDSLVNPGPAMASHKDDEEKFFPQSGVLIFGKQGSEKTNVDIEKVMITDEEEIRTTNPVATEQYGSVSTNLQGGNTQAATADVNTQGVLPGMVWQDRDVYLQGPIWAKIPHTDGHFHPSPLMGGFGLKHPPPQILIKNTPVPANPSTTFSAAKFASFITQYSTGQVSVEIEWELQKENSKRWNPEIQYTSNYNKSVNVDFTVDTNGVYSEPRPIGTRYLTRNL

SEQ ID NO: 2577 - DNA, 3161 bp, Artificial Sequence
  Synthetic polynucleotide
gattgaatttagcggccgcgaattcgcccttgctgcgtcaactggaccaatgagaactttccattcaatgattgcgtcgacaagatggtgatctggtgggaggagggaaagatgaccgccaaggtcatggagtcggccaaagccattctcggaggaagcaaggtgcgcgtggaccagaaatgtaagtcctcggcccagatagacccgactcccgtgattgtcacctccaacaccaacatgtgcgccgtgattgacgggaactcaacgaccttcgagcaccagcagccgttgcaagaccggatgttcaaatttgaactcacccgccgtctggatcatgactttgggaaggtcaccaagcaggaagtcaaagactttttccggtgggcaaaggatcacgtggttgaggtggagcatgaattctacgtcaaaaagggtggagccaagaaaagacccgcccccagtgacgcagatataagtgagcccaaacgggcgcgcgggtcagttgcgcagccatcgacgtcagacgcggaagcttcgatcaactacgcggacaggtaccaaaacaaatgttctcgtcacgtgggcatgaatctgatgctgtttccctgcagacaatgcgagagaatgaatcaaaattcaaatatctgcttcactcacggacagaaggactgtttagagtgctttcccgtgtcagaatctcaacccgtttctgtcgtcaaaaaggcgtatcagaaactttgctacattcatcatatcatgggaaaggtgccagacgcttgcactgcctgcgatctggtcaatgtggatttggatgactgcatctctgaacaataaatgatttaaatcaggtatggctgccgatggttatcttccagattggctcaaggacactctctctgaaggaataagacagtggtggaagctcaaacctggcccaccaccaccaaagcccgcagagcggcataaggacgacagcgggggtcttgtgcttcctgggtacaagtacctcggacccttcaacggactcgacaagggagagccggtcaacgaggcagacgccgcggccctcgagtacgacaaggcctacgaccggcagctcgacagcggagacaacccgtacctcaagtacaaccacgccgacgcggagtttcaggagcgccttaaagaagatacgtcttttgggggcaacctcggacgagcagtcttccaggcgaaaaagagggttcttgaacctctgggcctggttgaggaacctgttaagacggctccgggaaaaaagaggccggtagagcactctcctgtggagccagactcctcctcgggaacaggaaaagcgggccagcagcctgcgagaaagagattgaattttggtcagactggagacgcagactccgtacctgacccccagcctctcggacagccaccagcagccccctctggtctgggaactaatacgatggctacaggcagtggcgcaccaatggcagacaataacgagggcgccgacggagtgggtaattcctcgggaagttggcattgcgattccacatggatgggcgacagagtcatcaccaccagcacccgaacctgggctctgcccacctacaacaaccatctgtacaagcagatctccagccaatcaggagccagcaacgacaaccactactttggctacagcaccccttgggggtattttgacttcaacagattccactgccacttttcaccacgtgactggcaaagactcatcaacaacaactggggattccggcccaagagactcaacttcaagctctttaacattcaagtcaaggaggtcacgcagaatgacggtacgacgacgattgccaataaccttaccagcacggttcaggtgtttactgactcggagtaccagctcccgtacgtccccggctcggcgcatcaaggatgcctcccgccgttcccagcagacgtcttcatggtgccacagtatggatacctcaccctgaacaacgggagtcaggcagtaggacgctcttcattttactgcctggagtactttccttctcagatgcttcgtaccggaaacaactttaccttcagctacacctttgaggatgttcctttccacagcagctacgctcacagccagagtttggaccgtctcatgaatcctctcatcgaccagtacctgtattacttgagcagaacaaacactccaagcggaaccaccacgcagtccaggcttcagttttctcaggccggagcaagtgacattcgggaccagtctaggaactggcttcctggaccctgttaccgccagcagcgagtatcaaagacagctgcggacaacaacaacagtgaatactcgtggactggagctaccaagtaccacctcaatggcagagactctctggtgaatccgggcccggccatggccagccacaaggacgatgaagaaaagttttttcctcaaagcggggttctcatctttgggaagcaaggctcagagaaaacaaatgtggacattgaaaaggtcatgattacagacgaagaggaaatcagaaccaccaatcccgtggccacggagcagtatggttctgtatctaccaacctccagagcggcaacacacaagcagctactgcagatgtcaacacacaaggcgttcttccaggcatggtctggcaggacagagacgtgcacctgcaggggcctatctgggcaaagattccacacacggacggacattttcacccctctcccctcatgggcggatttggacttaaacaccctcctccacagattctcatcaagaacaccccggtacctgcaaatccttcgaccaccttcagtgcggcaaagtttgcttccttcatcacacagtattccacagggcaggtcagcgtggagatcgagtgggagctgcagaaggagaacagcaaacgctggaaccccgagatccagtacacttccaactacaacaaatctgttaatgtggactttactgtggacactaatggtgtgtattcagagcctcgccccattggcaccagatacctgactcgtaatctgtaattgcttgttaatcaataaaccgtttaattcgtttcagttgaactttggtctctgcgaagggcgaattcgtttaaaccctgcaggactagtccctttagtgagg

SEQ ID NO: 2578 - DNA, 3162 bp, Artificial Sequence
  Synthetic polynucleotide
gaattgaatttagcggccgcgaattcgcccttcgcagagaccaaagttcaactgaaacgaattaaacggtttattgattaacaagcaattacagattacgagtcaggtatctggtgccaatggggcgaggctctgaatacacgccattagtgtccacagtaaagtccacattaacagacttgttgtagttggaagtgtactgaatttcgggattccagcgtttgctgttttccttctgcagctcccactcgatctccacgctgacctgtcccgtggagtactgtgtgatgaaggaagcaaactttgccgcactgaaggtggtcgaaggattcgcaggtaccggggtgttcttgatgagaatctgtggaggagggtgtttaagtccgaatccacccatgaggggagaggggtgaaaatgtccgtccgtgtgtggaatctttgcccagatgggcccctgaaggtacacatctctgtcctgccagaccatgcctggaagaacgccttgtgtgttgacatctgcggtagctgcttgtctgttgcctctctggaggttggtagatacagaaccgtactgctccgtagccacgggattggttgtcctgatttcctcttcgtctgtaatcatgaccttttcaatgtccacatttgttttctctgagccttgcttcccaaagatgagaaccccgctctgaggaaaaaacttttcttcattgtccttgtggcttgccatggccgggcccggattcaccagagagtctctgccattgaggtggtacttggtagctccagtccacgagtattcactgttgttgttatccgcagatgtctttgatactcgctgctggcggtaacagggtccaggaagccagttcctagactggtcccgaatgtcactcgctccggcctgagaaaactgaagccttgactgcgtggtggttccacttggagtgtttgttgtgctcaagtaatacaggtactggtcgatgagaggattcatgagacggtccagactctggctgtgagcgtagccgctgtggaaaggaacgtcctcaaaagtgtagctgaaggtaaagttgtttccggtacgcagcatctgagaaggaaagtactccaggcagtaaaatgaagagcgtcctactgcctgactcccgttgttcagggtgaggtatccatactgtggcaccatgaagacgtctgctgggaacggcgggaggcatccttgatgcgccgagccgaggacgtacgggagctggtactccgagtcagtaaacacctgaaccgtgctggtaaggttattggcaatcgtcgtcgtaccgtcattctgcgtgacctctttgacttgaatgttaaagagcttgaagttgagtctcttgggtcggaatccccagttgttgttgatgagtctttgccagtcacgtggtgaaaagtggcagtggaatctgttgaagtcaaaatacccccaaggggtgctgtagccaaagtagtgattgtcgttcgaggctcctgattggctggaaatttgtttgtagaggtggttgttgtaggtgggcagggcccaggttcgggtgctggtggtgatgactctgtcgcccatccatgtggaatcgcaatgccaatttcccgaggaattacccactccgtcggcgccctcgttattgtctgccattggtgcgccactgcctgtagccatcgtattagttcccagaccagagggggctgctggtggctgtccgagaggctgggggtcaggtactgagtctgcgtctccagtctgaccaaaattcaatctttttcttgcaggctgctggcccgcctttccggttcccgaggaggagtctggctccacaggagagtgctctaccggcctcttttttcctggagccgtcttgacaggttccccaaccaggcccagaggttcaagaaccctctttttcgcctggaagactgctcgtccgaggttgcccccaaaagacgtatcttctttaaggcgctcctgaaactccgcgtcggcgtggttgtacttgaggtacgggttgtctccgctgtcgagctgccggtcgtaggctttgtcgtgctcgagggccgcggcgtctgcctcgttgaccggctctcccttgtcgagtccgttgaagggtccgaggtacttgtacccaggaagcacaagacccctgctgtcgtccttatgccgctctgcgggctttggtggtggtgggccaggtttgagcttccaccactgtcttattccttcagagagagtgtcctcgagccaatctggaagataaccatcggcagccatacctgatttaaatcatttattgttcaaagatgcagtcatccaaatccacattgaccagatcgcaggcagtgcaagcgtctggcacctttcccatgatatgatgaatgtagcacagtttctgatacgcctttttgacgacagaaacgggttgagattctgacacgggaaagcactctaaacagtctttctgtccgtgagtgaagcagatatttgaattctgattcattctctcgcattgtctgcagggaaacagcatcagattcatgcccacgtgacgagaacatttgttttggtacctgtctgcgtagttgatcgaagcttccgcgtctgacgtcgatggctgcgcaactgactcgcgcacccgtttgggctcacttatatctgcgtcactgggggcgggtcttttcttggctccaccctttttgacgtagaattcatgctccacctcaaccacgtgatcctttgcccaccggaaaaagtctttgacttcctgcttggtgaccttcccaaagtcatgatccagacggcgggtgagttcaaatttgaacatccggtcttgcaacggctgctggtgttcgaaggtcgttgagttcccgtcaatcacggcgcacatgttggtgttggaggtgacgatcacgggagtcgggtctatctgggccgaggacttgcatttctggtccacgcgcaccttgcttcctccgagaatggctttggccgactccacgaccttggcggtcatcttcccctcctcccaccagatcaccatcttgtcgacacagtcgttgaagggaaagttctcattggtccagttgacgcagcaagggcgaattcgtttaaacctgcaggactagtccctttagtgaggg

SEQ ID NO: 2579 - DNA, 3164 bp, Artificial Sequence
  Synthetic polynucleotide
gcgaattgaatttagcggccgcgaattcgcccttcgcagagaccaaagttcaactgaaacgaattaaacggtttattgattaacaagcaattacaaattacgagtcaggtatctggtgccaatggggcgaggctctgaatacacgccattagtgtccacagtaaagtccacattaacagacttgttgtagttggaagtgtactgaatttcgggattccagcgtttgctgttttccttctgcagctcccactcgatctccacgctgacctgtcccgtggagtactgtgtgatgaaggaagcaaactttgccgcactgaaggtggtcgaaggattcgcaggtaccggggtgttcttgatgagaatctgtggaggagggtgtttaggtccgaatccacccatgaggggagaggggtgaaaatgtccgtccgtgtgtggaatctttgcccagatgggcccctgaaggtacacatctctgtcctgccagaccatgcctggaagaacgccttgtgtgttgacatctgcggtagctgcttgtctgttgcctctctggaggttggtagatacagaaccatactgctccgtagccacgggattggttgtcctgatttcctcttcgtctgtaatcatgaccttttcaatgtccacatttgttttctctgagccttgcttcccaaagatgagaaccccgctctgaggaaaaaacttttcttcattgtccttgtggcttgccatggccgggcccggattcaccagagagtctctgccattgaggtggtacttggtagctccagtccacgagtattcactgttgttgttatccgcagatgtctttgatactcgctgctggcggtaacagggtccaggaagccagttcctagactggtcccgaatgtcactcgctccggcctgagaaaactgaagccttgactgcgtggtggttccacttggagtgtttgttgtgctcaagtaatacaggtactggtcgatgagaggattcatgagacggtccagactctggctgtgagcgtagctgctgtggaaaggaacgtcctcaaaagtgtagctgaaggtaaagttgtttccggtacgcagcatctgagaaggaaagtactccgggcagtaaaatgaagagcgtcctactgcctgactcccgttgctcagggtgaggtatccatactgtggcaccatgaagacgtctgctgggaacggcgggaggcatccttgatgcgccgagccgaggacgtacgggagctggtactccgagtcagtaaacacctgaaccgtgctggtaaggttattggcaatcgtcgtcgtaccgtcattctgcgtgacctctttgacttgaatgttaaagagcttgaagttgagtctcttgggtcggaatccccagttgttgttgatgagtctttgccagtcacgtggtgaaaagtggcagtggaatctgttgaagtcaaaatacccccaaggggtgctgtagccaaagtagtgattgtcgttcgaggctcctgattggctggaaatttgtctgtagaggtggttgttgtaggtgggcagggcccaggttcgggtgctggtggtgatgactctgtcgcccatccatgtggaatcgcaatgccgatttcccgaggaattacccactccgtcggcgccctcgttattgtctgccattggtgcgccactgcctgtagccatcgtattagttcccagaccagagggggctgctggtggctgtccgagaggctgggggtcaggtactgagtctgcgtctccagtctgaccaaaattcaatctttttcttgcaggctgctggcccgcctttccggttcccgaggaggagtctggctccacaggagagtgctctaccggcctcttttttcccggagccgtcttaacaggttccccaaccaggcccagaggttcaagaaccctctttttcgcctggaagactgctcgtccgaggttgcccccaaaagacgtatcttctttaaggcgctcctgaaactccgcgtcggcgtggttgtacttgaggtacgggttgtctccgctgtcgagctgccggtcgtaggctttgtcgtgctcgagggccgcggcgtctgcctcgttgaccggctctcccttgtcgagtccgttgaagggtccgaggtacttgtacccaggaagcacaagacccctgctgtcgtccttatgccgctctgcgggctttggtggtggtgggccaggtttgagcttccaccactgtcttattccttcagagagagtgtcctcgagccaatctggaagataaccatcggcagccatacctgatttaaatcatttattgttcaaagatgcagtcatccaaatccacattgaccagatcgcaggcagtgcaagcgtctggcacctttcccatgatatgatgaatgtagcacagtttctgatacgcctttttgacgacagaaacgggttgagattctgacacgggaaagcactctaaacagtctttctgtccgtgagtgaagcagatatttgaattctgattcattctctcgcattgtctgcagggaaacagcatcagattcatgcccacgtgacgagaacatttgttttggtacctgtctgcgtagttgatcgaagcttccgcgtctgacgtcgatggctgcgcaactgactcgcgcacccgtttgggcccacttatatctgcgtcactgggggcgggtcttttcttggctccaccctttttgacgtagaattcatgctccacctcaaccacgtgatcctttgcccaccggaaaaagtctttgacttcctgcttggtgaccttcccaaagtcatgatccagacggcgggtgagttcaaatttgaacatccggtcttgcaacggctgctggtgttcgaaggtcgttgagttcccgtcaatcacggcgcacatgttggtgttggaggtgacgatcacgggagtcgggtctatctgggccgaggacttgcatttctggtccacgcgcaccttgcttcctccgagaatggctttggccgactccacgaccttggcggtcatcttcccctcctcccaccagatcaccatcttgtcgacacagtcgttgaagggaaagttctcattggtccagttgacgcagcaagggcgaattcgtttaaacctgcaggactagtccctttagtgaggg

SEQ ID NO: 2580 - DNA, 3163 bp, Artificial Sequence
  Synthetic polynucleotide
accctcactaaagggactagtcctgcaggtttaaacgaattcgcccttgctgcgtcaactggagcaatgagaactttcccttcaacgactgtgtcgacaagatggtgatttggtgggaggaggggaagatgaccgccaaggtcgtggagtcggccaaagccattctcggaggaagcaaggtgcgcgtggaccagaaatgcaagtcctcggcccagatagatccgactcccgtgatcgtcacctccaacaccaacatgtgcgccgtgattgacgggaactcaacgaccttcgaacaccagcagccgttgcaagaccggatgttcaaatttgaactcacccgccgtctggatcatgactttgggaaggtcaccaagcaggaagtcaaagactttttccggtgggcaaaggatcacgtggttgaggtggagcatggattctacgtcaaaaagggtggagccaagaaaagacccgcccctagtgacgcagatataagtgagcccaaacgggtgcgcgagtcagttgcgcagccatcgacgtcggacgcggaagcttcgatcaactacgcggacaggtaccaaaacaaatgttctcgtcacgtgggcatgaatctgatgctgtttccctgcagacaatgcgagagaatgaatcaaaattcaaatatctgcttcactcacggacagaaagactgtttagagtgctttcccgtgtcagaatctcaacctgtttctgtcgtcaaaaaggcgtatcagaaactgcgctacattcatcatatcatgggaaaggtgccagacgcttgcactgcctgcgatctggtcaatgtggatttggatgactgcatctctgaacaataaatgatttaaatcaggtatggctgccgatggttatcttccagattggctcgaggacactctctctgaaggaataagacagtggtggaagctcaaacctggcccaccaccaccaaagcccgcagagcggcataaggacgacagcaggggtcttgtgcttcctgggtacaagtacctcggacccttcaacggactcgacaagggagagccggtcaacgaggcagacgccgcggccctcgagcacgacaaggcctacgaccggcagctcgacagcggagacaacccgtacctcaagtacaaccacgccgacgcggagtttcaggagcgtcttaaagaagatacgtcttttgggggcaacctcggacgagcagtcttccaggcgaaaaagagggttcttgaacctctgggcctggttgaggaacctgttaagacggctccgggaaaaaagaggccggtagagcactctcctgcggagccagactcctcctcgggaaccggaaaagcgggccagcagcctgcaagaaaaagactgaatttcggtcagactggagacgcagactccgtacctgacccccagcctctcggacagccaccagcagcccccacaagtttgggatctactacaatggctacaggcagtggcgcaccaatggcagacaataacgagggtgccgatggagtgggtaattcctcaggaaattggcattgcgattcccaatggctgggcgacagagtcatcaccaccagcacccgaacctgggccctgcccacctacaacaaccacctttacaagcaaatctccagccaatcaggagcctcaaacgacaaccactactttggctacagcaccccctgggggtattttgacttcaacagattccactgccacttttcaccacgtgactggcaaagactcatcaacaacaactggggattccgacccaagagactcaacttcaagctctttaacattcaagtcaaagaggtcacgcagaatgacggtacgacgacgattgccaataaccttaccagcacggttcaggtgtttactgactcggagtaccagctcccgtacgtcctcggctcggcgcatcaaggatgcctcccgccgtttccagcggacgtcttcatggtcccacagtatggatacctcaccctgaacaacgggagtcaggcggtaggacgctcttccttttactgcctggagtgctttccttctcagatgctgcgtactggaaacaactttcagttcagctacacttttgaagacgtgcctttccacagcagctacgctcacagccagagtttggatcggctgatgaatcctctgatcgaccagtacctgtattatctaaacagaacacaaacagctagtggaactcagcagtctcggctactgtttagccaagctggacccacaagcatgtctcttcaagctaaaaactggctgcctggaccgtgttatcgccagcagcgtttgtcaaagcaggcaaacgacaacaacaacagcaactttccctggactggagctaccaagtaccacctcaatggcagagactctttggtgaacccgggcccggccatggccagccacaaggacgatgaagaaaagtttttccccatgcatggaaccctaatatttggtaaagaaggaacaaatgctaccaacgcggaattggaaaatgtcatgattacagatgaagaggaaatcaggaccaccaatcccgtggctacagagcagtacggatatgtgtcaaataatttgcaaaactcaaatactgctgcaagtactgaaactgtgaatcaccaaggagcattacctggtatggtgtggcaggatcgagacgtgtacctgcagggacccatttgggccaagattcctcacaccgatggacactttcatccttctccactgatgggaggttttggactcaaacacccgcctcctcagattatgatcaaaaacactcccgttccagccaatcctcccacaaacttcagttctgccaagtttgcttccttcatcacacagtattccacgggacaggtcagcgtggagatcgagtgggagctgcagaaggagaacagcaaacgctggaatcccgaaattcagtacacttccaactacaacaaatctgttaatgtggactttactgtggacactaatggtgtgtattcagagcctcgccccattggcaccagatacctgactcgtaatctgtaattgcttgttaatcaataaaccgtttaattcgtttcagttgaactttggtctctgcgaagggcgaattcgcggccgctaaattcaattcgcc

SEQ ID NO: 2581 - protein, 735 aa, Artificial Sequence
  Synthetic polypeptide
MAADGYLPDWLEDTLSEGIRQWWKLKPGPPPPKPAERHKDDSRGLVLPGYKYLGPFNGLYKGEPVDEADAAALEHDKAYDRQLDSGDNPYLKYNHADAEFQERLKEDTSFGGNLGRAVFQAKKRVLEPLGLVGEPVKTAPGKKRPVEHSPVEPDSSSGTGKAGNQPARKRLNFGQTGDADSVPDPQPLGQPPAAPSGLGSTTMATGSGAPVADNNEGADGVGNSSGNWHCDSQWLGDRVITTSTRTWALPTYNNHLYKQISSQSGASNDNHYFGYSTPWGYFDFNRFHCHFSPRDRQRLINNNWGFRPKRLNFKLFNIQVKEVTQNDGTTTIANNLTSTVQVFTDSGYQLPYVLGLAHQGCLPPFPADVFMVPQYGYLTLNNGSQAVGRSSFYCLEYFPSQMLRTGNNFQFSYTFEDVPFHSSYAHSQSLDRLMNPLIDQYLYYLNKTQSNSGTLQQSRLLFSQAGPTSMSLQAKNWLPGPCYRQQRLSKQANDNNNSNFPWTAATKYHLNGRDSLVNPGPAMASHKDDEEKFFPMHGTLIFGKQGTNANDADLDNVMITDEEEIRTTNPVATEQYGYVSNNLQNSNTGPTTGTVNHQGALPGMVWQDRDVYLQGPIWAKIPHTDGHFHPSPLMGGFGLKHPPPQIMIKNTPVPANPPTNFSSAKFASFITQYSTGQVSVEIEWELQKEDSKRWNPEIQYTSNYNKPVNVDFTVDTNGVYSEPRPIGTRYLTRNL

SEQ ID NO: 2582 - DNA, 2208 bp, Artificial Sequence
  Synthetic polynucleotide
atggctgccgatggttatcttccagattggctcgaggacactctctctgaaggaataagacagtggtggaagctcaaacctggcccaccaccaccaaagcccgcagagcggcataaggacgacagcaggggtcttgtgcttcctgggtacaagtacctcggacccttcaacggactctacaagggagagccggtcgacgaggcagacgccgcggccctcgagcacgacaaggcctacgaccggcagctcgacagcggagacaacccgtacctcaagtacaaccacgccgacgcggagtttcaggagcgccttaaagaagatacgtcttttgggggcaacctcggacgagcagtcttccaggccaaaaagagggttcttgaacctctgggcttggttggggagcctgttaaaacggctccgggaaaaaagaggccggtagagcactctcctgtggagccagactcctcctcgggaaccggaaaagcgggcaaccagcctgcaagaaaaagattgaattttggtcagactggagacgcagactccgtacctgacccccagcctctcggacagccaccagcagccccctctggtctgggatctactacaatggctacaggcagtggcgcaccagtggcagacaataacgagggtgccgatggagtgggtaattcctcaggaaattggcattgcgattcccaatggctgggcgacagagtcatcaccaccagcacccgaacctgggctctgcccacctacaataaccacctctacaagcaaatctccagccaatcaggagcctcaaacgacaaccactactttggctacagcaccccctgggggtattttgacttcaacagattccactgccacttttcaccacgtgaccggcaaagactcatcaacaacaactggggattccgaccaaaaagactcaacttcaagctctttaacattcaagtcaaagaggtcacgcagaatgacggtacgacgacgattgccaataaccttaccagcacggttcaggtgtttactgactcggggtaccagctcccgtacgtcctcggcttggcgcatcaaggatgcctcccgccgttcccagcagacgtcttcatggtgccacagtatggatacctcaccctgaacaacgggagtcaggcggtaggacgctcttccttttactgcctggagtactttccttctcagatgctgcgtactggaaacaactttcagttcagctacacctttgaagacgttcctttccacagcagctacgctcacagccagagtctggatcggctgatgaatcctctgatcgaccagtacctgtattatctgaacaagacacaatcaaatagtggaactcttcagcagtctcggctactgtttagccaagctggacccaccagcatgtctcttcaagctaaaaactggctgcctggaccttgctacagacagcagcgtctgtcaaagcaggcaaacgacaacaacaacagcaactttccctggactgcggctacaaagtatcatctaaatggccgggactcgttggttaatccaggaccagctatggccagccacaaagacgatgaagaaaagtttttccccatgcatggaaccctgatatttggtaaacaaggaacaaatgctaacgacgcggatttggacaatgtcatgattacagatgaagaagaaatccgcaccaccaatcccgtggctacggagcagtacggatatgtgtcaaataatttgcaaaactcaaatactggtccaactactggaactgtcaatcaccaaggagcgttacctggtatggtgtggcaggatcgagacgtgtacctgcagggacccatttgggccaagattcctcacaccgatggacactttcatccttctccacttatgggaggttttggactcaaacacccacctcctcagatcatgattaaaaacactcccgttccagccaatcctcccacaaacttcagttctgccaagtttgcttctttcatcacacagtattccacgggacaagtcagcgtggagatcgagtgggagctgcagaaggaggacagcaaacgctggaaccccgagatccagtacacttccaactataacaaacctgttaatgtggactttactgtggacactaatggtgtgtattcagagcctcgccccattggcaccagatacctgactcgtaatctgtaa

SEQ ID NO: 2583 - DNA, 3161 bp, Artificial Sequence
  Synthetic polynucleotide
cgaattgatttagcggccgcgaattcgcccttcgcagagaccaaagttcaactgaaacgaattaaacggtttattgattaacaagcaattacagattacgagtcaggtatctggtgccaatggggcgaggctctgaatacacaccattagtgtccacagtaaagtccacattaacagatttgttgtagttggaagtgtactggatctcgggattccagcgtttgctgttctccttctgtagctcccactcgatctccacgctgacccgccccgtggaatactgtgtgatgaaggaagcaaactttgccgcactgaaggtggtcgaaggattcgcaggtaccggggtgtttttgatgagaatctgtggaggagggtgtttaagtccgaatccgcccatgaggggagaggggtgaaaatgtccgtccgtgtgcggaatctttgcccagataggcccctgcaggtacacgtctctgtcctgccagaccatgcctggaagaacgccttgtgtgttgacatctgcagtagatgcttgtgtgttgccgctctggaggttggtagatacagaaccatactgctccgtggccacgggattggtggttctgatttcctcttcgtctgtaatcatgaccttttcaatgtccacatttgttttctctgatccttgttttccaaagatgagaaccccgctctgaggaaaaaacttttcttcatcgtccttgtggctggccattgccgggcccggattcaccagagagtctctgccattgaggtggtacttggtagctccaatccacgagtattcactgttgttgttgtccgcagatgtctttgatactcgctgctggcggtaacagggtccaggaagccagttcctagactgatcccgaatgtcactcgctccggcctgagaaaactgaagcctggactgcgtggtggttccgcttggagtgtttgttctgctcaagtaatacaggtactggtcgatgagaggattcatgagacggtccaaactctggctgtgagcgtagctgctgtggaaaggaacatcctcaaaggtgtagctgaaggtaaagttgtttccggtacgcagcatctgagaagggaagtactccaggcagtaaaatgaagagcgtcctactgcctgactcccgttgttcagggtgaggtatccatactgtggcaccatgaagacgtctgctgggaacggcgggaggcatccttgatgcgccgagccgaggacgtacgggagctggtactccgagtcagtaaacacctgaaccgtgctggtaaggttattggcaatcgtcgtcgtaccatcattctgcgtgacctctctgacttgaatgttaaagagcttgaagttgagtctcttgggccggaatccccagttgttgttgatgagtctttgccagtcacgtggtgaaaagtggcagtggaatctgttgaagtcaaaatacccccaaggggtgctgtagccaaagtagtggttgtcgttgctggctcctgattggctggaaatctgcttgtacagatggttgttgtaggtgggcagagcccaggttcgggtgctggtggtgatgactctgtcgcccatccatgtggaatcgcaatgccaatttcccgaggaattacccactccgtcggcgccatcgttattgtctgccattggtgcgccactgcctgtagccatcgtattagttcccagaccagagggggctgctggtggctgtccgagaggctgggggtcaggtacggagtctgcgtctccagtctgaccgaaattcaatctctttcttgcaggctggttgcccgcttttccggttcccgaggaggagtctggctccacaggagagtgctctaccggcctcttttttcccggagccgtcttaacaggctcctcaaccaggcccagaggttcaagaaccctcttttttgcctggaagactgctcgtccgaggttgcccccaaaagacgtatcttctttaaggcgctcctgaaactccgcgtcggcgtggtcgtacttgaggtacgggttgtctccgctgtcgagctgccggtcgtaggccttgtcgtgctcgagggccgcggcgtctgcctcgttgaccggctctcccttgtcgagtccgttgaagggtccgaggtacttgtacccaggaagcacaagacccctgctgtcgtccttatgccgctctgcgggctttggtggtggtgggccaggtttgagcttccaccactgtcttattccttcagagagagtgtcctcgagccaatctggaagataaccatcggcagccatacctgatttaaatcatttattgttcagagatgcagtcatccaaatccacattgaccagatcgcaggcagtgcaagcgtctggcacctttcccatgatatgatgaatgtagcaaagtttctgatacgcctttttgacgacagaaacgggttgagattctgacacgggaaagcactctaaacagtctttctgtccgtgagtgaagcagatatttgaattctgattcattctctcgcattgtctgcagggaaacagcatcagattcatgcccacgtgacgagaacatttgttttggtacctgtccgcgtagttgatcgaagcttccgcgtctgacgtcgatggctgcgcaactgactcgcgcgcccgtttgggctcacttatatctgcgtcactgggggcgggtcttttcttggctccaccctttttgacgtagaattcatgctccacctcaaccacgtgatcctttgcccaccggaaaaagtctttcacttcctgcttggtgaccttcccaaagtcatgatccagacggcgggttagttcaaatttgaacatccggtcttgcaacggctgctggtgttcgaaggtcgttgagttcccgtcaatcacggcgcacatgttggtgttggaggtggcgatcacgggagtcgggtctatctgggccgaggacttgcacttttggtccacgcgcaccttgcttcctccgagaatggcttcggccgattccacgaccttggcggtcatctttccctcctcccaccagatcaccatcttgtcgacacagtcgttgaagggaaagttctcattggtccagttgacgcagcaagggcgaattcgtttaaacctgcaggaactagtcccttagtgagg

SEQ ID NO: 2584 - protein, 735 aa, Artificial Sequence
  Synthetic polypeptide
MAADGYLPDWLEDTLSEGIRQWWKLKPGPPPPKPAERHKDDSRGLVLPGYKYLGPFNGLYKGEPVNEADAAALEHDKAYDRQLDSGDNPYLKYNHAGAEFQERLKEDTSFGGNLGRAVFQAKKRVLEPLGLVEEPVKTAPGKKRPVEHSPVEPDSSSGTGKAGNQPARKRLNFGQTGDADSVPDPQPLGQPPAAPSGLGSTTMATGSGAPVADNNEGADGVGNSSGNWHCDSQWLGDRVITTSTRTWALPTYNNHLYKQISSQSGASNDNHYFGYSTPWGYFDFNRFHCHFSPRDWQRLINNNWGFRPKRLNFKLFNIQVKEVTQNDGTTTIANNLTSTVQVFTDSEYQLPYVLGSAHQGCLPPFPADVFMVPQYGYLTLNNGSQAVGRSSFYCLEYFPSQMLRTGNNFQFSYTFEDVPFHSSYAHSQSLDRLMNPLIDQYLYYLNKTQSNSGTLQQSRLLFSQAGPTSMSLQAKNWLPGPCYRQQRLSKQANDNNNSNFPWTAATKYHLNGRDSLVNPGPAMASHKDDEEKFFPMHGTLIFGKQGTNANDADLDNVMITDEEEIRTTNPVATEQYGYVSNNLQDSNTGPTTGTVNHQGALPGMVWQDRDVYLQGPIWAKIPHTDGHFHPSPLMGGFGLKHPPPQIMIKNTPVPANPPTNFSSAKFASFITQYSTGQVSVEIEWELQKENSKRWNPEIQYTSNYNKSVNVDFTVDTNGVYSEPRPIGTRYLTRNL

SEQ ID NO: 2585 - DNA, 2208 bp, Artificial Sequence
  Synthetic polynucleotide
atggctgccgatggttatcttccagattggctcgaggacactctctctgaaggaataagacagtggtggaagctcaaacctggcccaccaccgccaaagcccgcagagcggcataaggacgacagcaggggtcttgtgcttcctgggtacaagtacctcggacccttcaacggactctacaagggagagccggtcaacgaggcagacgccgcggccctcgagcacgacaaggcctacgaccggcagctcgacagcggagacaacccgtacctcaagtacaaccacgccggcgcggagtttcaggagcgccttaaagaagatacgtcttttgggggcaacctcggacgagcagtcttccaggccaaaaagagggttcttgaacctctgggcttggttgaggagcctgttaaaacggctccgggaaaaaagaggccggtagagcactctcctgtggagccagactcctcctcgggaaccggaaaagcgggcaaccagcctgcaagaaaaagattgaattttggtcagactggagacgcagactccgtacctgacccccagcctctcggacagccaccagcagccccctctggtctgggatctactacaatggctacaggcagtggcgcaccagtggcagacaataacgagggtgccgatggagtgggtaattcctcaggaaattggcattgcgattcccaatggctgggcgacagagtcatcaccaccagcacccgaacctgggctctgcccacctacaacaaccacctctacaagcaaatctccagccaatcaggagcctcaaacgacaaccactactttggctacagcaccccctgggggtattttgacttcaacagattccactgccacttttcaccacgtgactggcaaagactcatcaacaacaactggggattccgaccaaagagactcaacttcaagctctttaacattcaagtcaaagaggtcacgcagaatgacggtacgacgacgattgccaataaccttaccagcacggttcaggtgtttactgactcggagtaccagctcccgtacgtcctcggctcggcgcatcaaggatgcctcccgccgttcccagcagacgtcttcatggtgccacagtatggatacctcaccctgaacaacgggagtcaggcggtaggacgctcttccttttactgcctggagtactttccttctcagatgctgcgtactggaaacaactttcagttcagctacacctttgaagacgttcctttccacagcagctacgctcacagccagagtctggatcggctgatgaatcctctgatcgaccagtacctgtattatctgaacaagacacaatcaaatagtggaacccttcagcagtctcggctactgtttagccaagctggacccaccagcatgtctcttcaagctaaaaactggctgcctggaccttgctacagacagcagcgtctgtcaaagcaggcaaacgacaacaacaacagcaactttccctggactgcggctacaaagtatcatctaaatggccgggactcgttggttaatccaggaccagctatggccagccacaaagacgatgaagaaaagtttttccccatgcatggaaccctgatatttggtaaacaaggaacaaatgctaacgacgcggatttggacaatgtcatgattacagatgaagaagaaatccgcaccaccaatcccgtggctacggagcagtacggatatgtgtcaaataatttgcaagactcaaatactggtccaactactggaactgtcaatcaccaaggagcgttacctggtatggtgtggcaggatcgagacgtgtacctgcagggacccatttgggccaagattcctcacaccgatggacactttcatccttctccacttatgggaggttttggactcaaacacccacctcctcagatcatgattaaaaacactcccgttccagccaatcctcccacaaacttcagttctgccaagtttgcttctttcatcacacagtattccacgggacaagtcagcgtagagatcgagtgggagctgcagaaggagaacagcaaacgctggaaccccgagatccagtacacttccaactataacaaatctgttaatgtggactttactgtggacactaatggtgtgtattcagagcctcgccccattggcaccagatacctgactcgtaatctgtaa

SEQ ID NO: 2586 - protein, 738 aa, Artificial Sequence
  Synthetic polypeptide
MAADGYLPDWLEDNLSEGIREWWDLKPGAPKPKANQQKQDDGRGLVLPGCKYLGPFNGLDKGEPVNAADAAALEHDKAYDQQLKAGDNPYLRYNHADAEFQERLQEDTSFGGNLGRAVFQAKKRVLEPLGLVEEGAKTAPGKKRPVEPSPQRSPDSSTGIGKTGQQPAKKRLNFGQTGDSESVPDPQPIGEPPAGPSGLGSGTMAAGGGAPMADNNEGADGVGSSSGNWHCDSTWLGDRVITTSTRTWALPTYNNHLYKQISNGTSGGSTNDNTYFGYSTPWGYFDFNRFHCHFSPRDWQRLINNNWGFRPKRLNFKLFNIQVKEVTQNEGTKTIANNLTSTIQVFTDSEYQLPYVLGSAHQGCPPPFPADVFMIPQYGYLTLNNGSQAVGRSSFYCLEYFPSQMRRTGNNFEFSYQFEDVPFHSSYAHSQSLDRLMNPLIDQYLYYLSRTQSTGGTAGTQQLLFSQAGPNNMSAQAKNWLPGPCYRQQRVSTTLSQNNNSNFAWTGATKYHLNGRDSLVNPGVAMATHKDDEERFFPSSGVLMFGKQGAGKDNVDYSSVMLTSEEEIKTTNPVATEQYGVVADNLQQQNAAPIVGAVNSQGALPGMVWQNRDVYLQGPIWAKIPHTDGNFHPSPLMGGFGLKHPPPQILIKNTPVPADPPTTFSQAKLASFITQYSTGQVSVEIEWELQKENSKRWNPEIQYTSNYNKSVNVDFTVDTNGVYSEPRPIGTRYLTRNL

SEQ ID NO: 2587 - DNA, 2217 bp, Artificial Sequence
  Synthetic polynucleotide
atggctgccgatggttatcttccagattggctcgaggacaacctctctgagggcattcgcgagtggtgggacttgaaacctggagccccgaaacccaaagccaaccagcaaaagcaggacgacggccggggtctggtgcttcctggctgcaagtacctcggacccttcaacggactcgacaagggggagcccgtcaacgcggcggacgcagcggccctcgagcacgacaaggcctacgaccagcagctcaaagcgggtgacaatccgtacctgcggtataaccacgccgacgccgagtttcaggagcgtctgcaagaagatacgtcttttgggggcaacctcgggcgagcagtcttccaggccaagaagcgggttctcgaacctctcggtctggttgaggaaggcgctaagacggctcctggaaagaagagaccggtagagccatcaccccagcgttctccagactcctctacgggcatcggcaagacaggccagcagcccgcgaaaaagagactcaactttgggcagactggcgactcagagtcagtgcccgaccctcaaccaatcggagaaccccccgcaggcccctctggtctgggatctggtacaatggctgcaggcggtggcgctccaatggcagacaataacgaaggcgccgacggagtgggtagttcctcaggaaattggcattgcgattccacatggctgggcgacagagtcatcaccaccagcacccgaacctgggccctccccacctacaacaaccacctctacaagcaaatctccaacgggacatcgggaggaagcaccaacgacaacacctacttcggctacagcaccccctgggggtattttgactttaacagattccactgccacttctcaccacgtgactggcagcgactcatcaacaacaactggggattccggcccaagagactcaacttcaagctcttcaacatccaggtcaaggaggtcacgcagaatgaaggcaccaagaccatcgccaataaccttaccagcacgattcaggtctttacggactcggaataccagctcccgtacgtcctcggctctgcgcaccagggctgcccgcctccgttcccggcggacgtcttcatgattcctcagtacgggtacctgactctgaacaacggcagtcaggccgtgggccgttcctccttctactgcctggagtactttccttctcaaatgcggagaacgggcaacaactttgagttcagctaccagtttgaggacgtgccttttcacagcagctacgcgcatagccaaagcctggaccggctgatgaaccccctcatcgaccagtacctgtactacctgtctcggactcagtccacgggaggtaccgcaggaactcagcagttgctattttctcaggccgggcctaataacatgtcggctcaggccaaaaactggctacccgggccctgctaccggcagcaacgcgtctccacgacactgtcgcaaaataacaacagcaactttgcttggaccggtgccaccaagtatcatctgaatggcagagactctctggtaaatcccggtgtcgctatggcaacgcacaaggacgacgaagagcgattttttccatccagcggagtcttgatgtttgggaaacagggagctggaaaagacaacgtggactatagcagcgttatgctaaccagtgaggaagaaatcaaaaccaccaacccagtggccacagaacagtacggcgtggtggccgataacctgcaacagcaaaacgccgctcctattgtaggggccgtcaacagtcaaggagccttacctggcatggtctggcagaaccgggacgtgtacctgcagggtcctatctgggccaagattcctcacacggacggcaactttcatccttcgccgctgatgggaggctttggactgaaacacccgcctcctcagatcctgattaagaatacacctgttcccgcggatcctccaactaccttcagtcaagccaagctggcgtcgttcatcacgcagtacagcaccggacaggtcagcgtggaaattgaatgggagctgcagaaagagaacagcaagcgctggaacccagagattcagtatacttccaactataacaaatctgttaatgtggactttactgtggacactaatggtgtgtattcagagcctcgccccattggcaccagatacctgactcgtaatctgtaa

SEQ ID NO: 2588 - DNA, 3167 bp, Artificial Sequence
  Synthetic polynucleotide
attgaatttagcggccgcgaattcgcccttcgcagagaccaaagttcaactgaaacgaattaaacggtttattgattaacaagcaattacagattacgagtcaggtacctggtgccaatggggcgaggctctgaatacacaccattagtgtccacagtaaagtccacattaacagatttgttgtagttggaagtgtactgaatctcgggattccagcgtttgctgttctccttctgcagctcccactcgatctccacgctgacctgccccgtggagtactgtgtaatgaaggaagcaaactttgccgcactgaaggtagtcgaaggattcgcaggtaccggggtgttcttgatgagaatctgcgggggagggtgtttaagtccgaatccgcccatgaggggagaggggtgaaaatgtccgtccgtgtgtggaatctttgcccagatgggcccctgcaggtacacgtctctgtcctgccacaccatgcctggaagaacgccttgtgtgttgacatctgaggtagctgcttgtgtgttgccgctctggaggttggtagatacagaaccatactgctccgtagccacgggattggtggtcctgatttcctcttcgtctgtaatcatgaccttttcaatgtccacattagtttttcccgagtcttgttttccaaagatgagaaccccgctctgaggaaaaaacttttcttcatcgtccttgtggctggccatggccgggcccggattcaccagagagtctcttccattaaggtggtacttggtagctccagtccacgagtattcactgttgttgttatccgcagatgtctttgatactcgctgctggcggtaacagggtccaggaagccagttcctagactggtcccgaatgtcacttgctccggcctgagaaaactgaagccttgactgcgtggtggttccgcttggagtgtttgttctgctcaagtaatacaggtactggtcgatgagaggattcatgagacggtccaaactctggctgtgggcgtagctgctgtggaaaggaacgtcctcaaaggtgtagctgaaggtaaagttgtttccggtacgcagcatctgagaaggaaagtactccaggcagtaaaatgaagagcgtcctactgcctgactcccgttgttcagggtgaggtatccatactgtggcaccatgaagacgtctgctgggaacggcgggaggcatccttgatgcgccgagccgaggacgtacgggagctggtactccgagtcagtaaacacctgaaccgtgctggtaaggttattggcaatcgtcgtcgtaccgtcattctgcgtgacctccttgacttgaatgttaaagagcttgaagttgagtcttttgggccggaatccccaattgttgttgatgagtctttgccagtcacgtggcgaaaagtggcagtggaatctgttgaagtcaaaatacccccaaggggtgctgtagccaaagtagtggttgtcgtttgaggctcctgattggctggaaatctgcttgtagaggtggttgttgtaggtgggcagagcccaggtgcgggtgctggtggtgatgactctgtcgcccatccatgtggaatcgcaatgccaatttcccgaggaattacccactccgtcggcgccctcgttattgtctgccattggtgcgccactgcctgtagccatcgtattagttcccagaccagagggggctgctggtggctgtccgagaggctgggggtcaggtacggagtctgcgtctccagtctgaccgaaattcaatctctttcttgcaggctgctggcccgcttttccggttcccgaggaggagtctggctccgcaggagagtgctctaccggcctcttttttcccggagccgtcttaacaggttcctcaaccaggcccagaggttcaagaaccctctttttcgcctggaagactgctcgtccgaggttgcccccaaaagacgtatcttctttaagacgctcctggaactccgcgtcggcgtggttgtacttggggtacgggttgtctccgctgtcgagctgccggtcgtaggccttgtcgtgctcgagggccgcggcgtctgcctcgttgaccggctctcccttgtcgagtccgttgaagggtccaaggtacttgtacccaggaagcacaagacccctgctgtcgtccttatgccgctctgcgggctttggtggtggtgggccaggtttgagcttccaccactgtcttattccttcagagagagtgtcctcgagccaatctggaagataaccatcggcagccatacctgatttaaatcatttattgttcagagatgcagtcatccaaatccacattgaccagatcgcaagcagtgcaagcgtctggcacctttcccatgatatgatgaatgtagcacagtttctgatacgcctttttgacgacagaaacgggttgagattctgacacgggaaagcactctaaacagtctttctgtccgtgagtgaagcagatatttgaattctgattcattctctcgcattgtctgcagggaaacagcatcagattcatgcccacgtgacgagaacatttgttttggtacctgtccgcgtagttgattgaagcttccgcgtctgacgtcgatggctgcgcaactgactcgcgcgcccgtttgggctcacttatatctgcgtcactgggggcgggtctttttttggctccaccctttttgacgtagaattcatgctctacctcaaccacgtgatcctttgcccaccggaaaaagtctttgacttcctgcttggtgaccttcccaaagtcatgatccagacggcgggtgagttcaaatttgaacatccggtcttgcaacggctgctggtgttcgaaggtcgttgagttcccgtcaatcactgcgcacatgttggtgttggaggtgacaatcacgggagtcgggtctatctgggccgaggacttgcatttctggtccacgcgcaccttgcttcctccgagaatggctttggccgactccacgaccttggcggtcatcttcccctcctcccaccagatcaccatcttgtcgacgcaatcattgaaaggaaagttctcattggtccagttgacgcagccgtagaaagggcgaattcgtttaaacctgcaggactagtccctttagtgagggt

SEQ ID NO: 2589 - DNA, 3161 bp, Artificial Sequence
  Synthetic polynucleotide
aattgaatttagcggccgcgaattcgcccttcgcagagaccaaagttcaactgaaacgaattaaacggtttattgattaacaagcaattacagattacgagtcaggtatctggtgccaatggggcgaggctctgaatacacaccattagtgtccacagtaaagtccacattaacagatttgttgtagttggaagtgtactgaatctcgggattccagcgtttgctgttctccttctgcagctcccactcgatctccacgctgacctgccccgtggagtactgtgtaatgaaggaagcaaactttgccgcactgaaggtagtcgaaggattcgcaggtaccggggtgttcttgatgagaatctgcgggggagggtgtttaagtccgaatccgcccatgaggggagaggggtgaaaatgtccgtccgtgtgtggaatctttgcccagatgggcccctgcaggtacacgtctctgtcctgccacaccatgcctggaagaacgccttgtgtgttgacatctgaggtagctgcttgtgtgttgccgctctggaggttggtagatacagaaccatactgctccgtagccacgggattggtggtcctgatttcctcttcgtctgtaatcatgaccttttcaatgtccacattagtttttcccgagtcttgttttccaaagatgagaaccccgctctgaggaaaaaacttttcttcatcgtccttgtggctggccatggccgggcccggattcaccagagagtctcttccattaaggtggtacttggtagctccagtccacgagtattcactgttgttgttatccgcagatgtctttgatactcgctgctggcggtaacagggtccaggaagccagttcctagactggtcccgaatgtcacttgctccggcctgagaaaactgaagccttgactgcgtggtggttccgcttggagtgtttgttctgctcaagtaatacaggtactggtcgacgagaggattcatgagacggtccaaactctggctgtgggcgtagctgctgtggaaaggaacgtcctcaaaggtgtagctgaaggtaaagttgtttccggtacgcagcatctgagaaggaaagtactccaggcagtaaaatgaagagcgtcctactgcctgactcccgttgttcagggtgaggtatccatactgtggcaccatgaagacgtctgctgggaacggcgggaggcatccttgatgcgccgagccgaggacgtacgggagctggtactccgagtcagtaaacacctgaaccgtgctggtaaggttattggcaatcgtcgtcgtaccgtcattctgcgtgacctccttgacttgaatgttaaagagcttgaagttgagtcttttgggccgggatccccaattgttgttgatgagtctttgccagtcacgtggcgaaaagtggcagtggaatctgttgaagtcaaaatacccccaaggggtgctgtagccaaagtagtggttgtcgtttgaggctcctgattggctggaaatctgcctgtagaggtggttgttgtaggtgggcagagcccaggtgcgggtgctggtggtgatgactctgtcgcccatccatgtggaatcgcaatgccaatttcccgaggaattacccactccgtcggcgccctcgttattgtctgccattggtgcgccactgcctgtagccatcgtattagttcccagaccagagggggctgctggtggctgtccgagaggctgggggtcaggtacggagtctgcgtctccagtctgaccgaaattcaatctccttcttgcaggctgctggcccgcttttccggttcccgaggaggagtctggctccgcaagagagtgctctaccggcctcttttttcccggagccgtcttaacaggttcctcaaccaggcccagaggttcaagaaccctctttttcgcctggaagactgctcgtccgaggttgcccccaaaagacgtatcttctttaagacgctcctggaactccgcgtcggcgtggttgtacttgaggtacgggttgtctccgccgtcgagctgccggtcgtaggccttgtcgtgctcgagggccgcggcgtctgcctcgttgaccggctctcccttgtcgagtccgttgaagggtccaaggtacttgtacccaggaagcacaagacccctgctgtcgtccttatgccgctctgcgggctttggtggtggtgggccaggtttgagcttccaccactgtcttattccttcagagagagtgtcctcgagccaatctggaagataaccatcggcagccatacctgatttaaatcatttattgttcagagatgcagtcatccaaatccacattgaccagatcgcaagcagtgcaagcgtctggcacctttcccatgatatgatgaatgtagcacagtttctgatacgcctttttgacgacagaaacgggttgagattctgacacgggaaagcactctaaacagtctttctgtccgtgagtgaagcagatatttgaattctgattcattctctcgcattgtctgcagggaaacagcatcagattcatgcccacgtgacgagaacatttgttttggtacctgtccgcgtagttgattgaagcttccgcgtctgacgtcgatggctgcgcaactgactcgcgcgcccgtttgggctcacttatatctgcgtcactgggggcgggtctttttttggctccaccctttttgacgtagaattcatgctctacctcaaccacgtgatcctttgcccaccggaaaaagtctttgacttcctgcttggtgaccttcccaaagtcatgatccagacggcgggtgagttcaaatttgaacatccggtcttgcaacggctgctggtgttcgaaggtcgttgagttcccgtcaatcactgcgcacatgttggtgttggaggtgacaatcacgggagtcgggtctatctgggccgaggacttgcatttctggtccacgcgcaccttgcttcctccgagaatggctttggccgactccacgaccttggcggtcatcttcccctcctcccaccagatcaccatcttgtcgacgcaatcattgaaaggaaagttctcattggtccagttgacgcagcaagggcgaattcgtttaaacctgcaggactagtccctttagtgaggg

SEQ ID NO: 2590 - DNA, 3172 bp, Artificial Sequence
  Synthetic polynucleotide
gattgaatttagcggccgcgaattcgcccttgctgcgtcaactggaccaatgagaactttcccttcaacgattgcgtcgacaagatggtgatctggtgggaggagggcaagatgaccgccaaggtcgtggagtccgccaaggccattctgggtggaagcaaggtgcgcgtggaccaaaagtgcaagtcatcggcccagatcgaccccacgcccgtgatcgtcacctccaacaccaacatgtgcgccgtgatcgacgggaacagcaccaccttcgagcaccagcagcccctgcaggaccgcatgttcaagttcgagctcacccgccgtctggagcacgactttggcaaggtgaccaagcaggaagtcaaagagttcttccgctgggctcaggatcacgtgactgaggtggcgcatgagttctacgtcagaaagggcggagccaccaaaagacccgcccccagtgacgcggatataagcgagcccaagcgggcctgcccctcagttgcggagccatcgacgtcagacgcggaagcaccggtggactttgcggacaggtaccaaaacaaatgttctcgtcacgcgggcatgcttcagatgctgtttccctgcaagacatgcgagagaatgaatcagaatttcaacgtctgcttcacgcacggggtcagagactgctcagagtgcttccccggcgcgtcggaatctcaacccgtcgtcagaaaaaagacgtatcagaaactgtgcgcgattcatcatctgctggggcgggcacccgagattgcgtgttcggcctgcgatctcgtcaacgtggacttggatgactgtgtttctgagcaataaatgacttaaaccaggtatggctgctgacggttatcttccagattggctcgaggacaacctctctgagggcattcgcgagtggtgggacctgaaacctggagcccccaagcccaaggccaaccagcagaagcaggacgacggccggggtctggtgcttcctggctacaagtacctcggacccttcaacggactcgacaagggggagcccgtcaacgcggcggacgcagcggccctcgagcacgacaaggcctacgaccagcagctcaaagcgggtgacaatccgtacctgcggtataaccacgccgacgccgagtttcaggagcgtctgcaagaagatacgtcttttgggggcaacctcgggcgagcagtcttccaggccaagaagcgggttctcgaacctctcggtctggttgaggaagctgctaagacggctcctggaaagaagagaccggtagaaccgtcacctcagcgttcccccgactcctccgcgggcatcggcaagaaaggccagcagcccgctaaaaagagactgaactttggtcagactggcgactcagagtcagtccccgaccctcaaccaatcggagaaccaccagcaggcccctctggtctgggatctggtacaatggctgcaggcggtggcgctccaatggcagacaataacgaaggcgccgacggagtgggtagttcctcaggaaattggcattgcgattccacatggctgggcgacagagtcatcaccaccagcacccgaacctgggccctgcccacctacaacaaccacctctacaagcaaatatccaatgggacatcgggaggaagcaccaacgacaacacctacttcggctacagcaccccctgggggtattttgacttcaacagattccactgccacttctcaccacgtgactggcagcgactcatcaacaacaactggggattccggccaaaaagactcagcttcaagctcttcaacatccaggtcaaggaggtcacgcagaatgaaggcaccgagaccatcgccaataaccttaccagcacgattcaggtatttacggactcggaataccagctgccgtacgtcctcggctccgcgcaccagggctgcctgcctccgttcccggcggacgtcttcatgattccccagtacggctaccttacactgaacaatggaagtcaagccgtaggccgttcctccttctactgcctggaatattttccatctcaaatgctgcgaactggaaacaattttgaattcagctacaccttcgaggacgtgcctttccacagcagctgcgcacacagccagagctcggaccgactgatgaatcctctcatcgaccagtacctgtactacttatccagaactcggtccacaggaggaactcaaggtacccagcaattgttattttctcaagctgggcctgcaaacatgtcggctcaggctaagaactggctacctggaccttgctaccggcagcagcgagtctctacgacactgtcgcaaaacaacaacagcaactttgcttggactggtgccaccaaatatcacctgaacggaagagactctttggtaaatcccggtgtcgccatggcaacccacaaggacgacgaggaacgcttcttcccgtcgagtggagtcctgatgtttggaaaacagggtgctggaagagacaatgtggactacagcagcgttatgctaaccagcgaagaagaaattaaaaccactaaccctgtagccacagaacaatacggtgtggtggctgacaacttgcagcaaaccaatacagggcctattgtgggaaatgtcaacagccaaggagccttacctggcatggtctggcagaaccgagacgtgtacctgcagggtcccatctgggccaagattcctcacacggacggcaacttccacccttcaccgctaatgggaggatttggactgaagcacccacctcctcagatcctgatcaagaacacgccggtacctgcggatcctccaacaacgttcagccaggcgaaattggcttccttcattacgcagtacagcaccggacaggtcagcgtggaaatcgagtgggagctgcagaaggagaacagcaaacgctggaacccagagattcagtacacttcaaactactacaaatctacaaatgtggactttgctgtcaatacagagggaacttattctgagcctcgccccattggtactcgttacctcacccgtaatctgtaattgctggttaatcaataaaccgtttgattcgtttcagttgaactttggtctctgcgaagggcgaattcgtttaaacctgcaggactagtccctttagtgagg

SEQ ID NO: 2591 - DNA, 3172 bp, Artificial Sequence
  Synthetic polynucleotide
gattgaatttagcggccgcgaattcgcccttgctgcgtcaactggaccaatgagaactttcccttcaacgattgcgtcgacaagatggtgatctggtgggaggagggcaagatgaccgccaaggtcgtggagtccgccaaggccattctgggtggaagcaaggtgcgcgtggaccaaaagtgcaagtcatcggcccagatcgaccccacgcccgtgatcgtcacctccaacaccaacatgtgcgccgtgatcggcgggaacagcaccaccttcgagcaccagcagcccctgcaggaccgcatgttcaagttcgagctcacccgccgtctggagcacgactttggcaaggtgaccaagcaggaagtcaaagagttcttccgctgggctcaggatcacgtgactgaggtggcgcatgagttctacgtcagaaagggcggagccaccaaaagacccgcccccagtgacgcggatataagcgagcccaagcgggcctgcccctcagttgcggagccatcgacgtcagacgcggaagcaccggtggactttgcggacaggtaccaaaacaaatgttctcgtcacgcgggcatgcttcagatgctgtttccctgcaagacatgcgagagaatgaatcagaatttcaacgtctgcttcacgcacggggtcagagactgctcagagtgcctccccggcgcgtcagaatctcaacccgtcgtcagaaaaaagacgtatcagaaactgtgcgcgattcatcatctgctggggcgggcacccgagattgcgtgttcggcctgcgatctcgtcaacgtggacttggatgactgtgtttctgagcaataaatgacttaaaccaggtatggctgctgacggttatcttccagattggctcgaggacaacctctctgagggcattcgcgagtggtgggacctgaaacctggagcccccaagcccaaggccaaccagcagaagcaggacgacggccggggtctggtgcttcttggctacaagtacctcggacccttcaacggactcgacaagggggagcccgtcaatgcggcggacgcagcggccctcgagcacgacaaggcctacgaccagcagctcaaagcgggtgacaatccgtacctgcggtataaccacgccgacgccgagtttcaggagcgtctgcaagaagatacgtcttttgggggcaacctcgggcgagcagtcttccaggccaagaagcgggttctcgaacctctcggtctggttgaggaagctgctaagacggctcctggaaagaagagaccggtagaaccgtcacctcagcgttcccccgactcctccacgggcatcggcaagaaaggccagcagcccgctaaaaagagactgaactttggtcagactggcgactcagagtcagtccccgaccctcaaccaatcggagaaccaccagcaggcccctctggtctgggatctggtacaatggctgcaggcggtggcgctccaatggcagacaataacgaaggcgccgacggagtgggtagttcctcaggaaattggcattgcgattccacatggctgggcgacagagtcatcaccaccagcacccgaacctgggccctgcccacctacaacaaccacctctacaagcaaatatccaatgggacatcgggaggaagcaccaacgacaacacctacttcggctacagcaccccctgggggtattttgacttcaacagattccactgccacttctcaccacgtgactggcagcgactcatcaacaacaactggggattccggccaaaaagactcagcttcaagctcttcaacatccaggtcaaggaggtcacgcagaatgaaggcaccaagaccatcgccaataaccttaccagcacgattcaggtatttacggactcggaataccagctgccgtacgtcctcggctccgcgcaccagggctgcctgcctccgttcccggcggacgtcttcatgattccccagtacggctaccttacactgaacaatggaagtcaagccgtaggccgttcctccttctactgcctggaatattttccatctcaaatgctgcgaactggaaacaattttgaattcagctacaccttcgaggacgtgcctttccacagcggctacgcacacagccagagcttggaccgactgatgaatcctctcatcgaccagtacctgtactacttatccagaactcagtccacaggaggaactcaaggtacccagcaattgttattttctcaagctgggcctgcaaacatgtcggctcaggctaagaactggctacctggaccttgctaccggcagcagcgagtctctacgacactgtcgcaaaacaacaacagcaactttgcttggactggtgccaccaaatatcacctgaacggaagagactctttggtaaatcccggtgtcgccatggcaacccacaaggacgacgaggaacgcttcttcccgtcgagtggagtcctgatgtttggaaaacagggtgctggaagagacaatgtggactacagcagcgttatgctaaccagcgaagaagaaattaaaaccactaaccctgtagccacagaacaatacggtgtggtggctgacaacttgcagcaaaccaatacagggcctattgtgggaaatgtcaacagccaaggagccttacctggcatggtctggcagaaccgagacgtgtacctgcagggtcccatctgggccaagattcctcacacggacggcaacttccacccttcaccgctaatgggaggatttggactgaagcacccacctcctcagatcctgatcaagaacacgccggtacctgcggatcctccaacgacgttcagccaggcgaaattggcttccttcattacgcagtacagcaccggacaggtcagcgtggaaatcgagtgggagctgcagaaggagaacagcaaacgctggaacccagagattcagtacacttcaaactactacaaatctacaaatgtggactttgctgtcaatacagagggaacttattctgagcctcgccccattggtactcgttacctcacccgtaatctgtaattgctggttaatcaataaaccgtttgattcgtttcagttgaactttggtctctgcgaagggcgaattcgtttaaacctgcaggactagtccctttagtgagg

SEQ ID NO: 2592 - DNA, 2208 bp, Artificial Sequence
  Synthetic polynucleotide
atggctgccgatggttatcttccagattggctcgaggacactctctctgaaggaataagacagtggtggaagctcaaacctggcccaccaccaccaaagcccgcagagcggcataaggacgacagcaggggtcttgtgcttcctgggtacaagtacctcggacccttcaacggactcgacaagggagagccggtcaacgaggcagacgccgcggccctcgagcacgacaaggcctacgaccggcagctcgaaagcggagacaacccgtacctcaagtacaaccacgccgacgcggagtttcaggagcgtcttaaagaagatacgtcttttgggggcaacctcggacgagcagtcttccaggcgaaaaagagggttcttgaacctctgggcctggttgaggagcctgttaaaacggctccgggaaaaaagaggccggtagagcactctcctgtggagccagactcctcctcgggaaccggaaaagcgggccagcagcctgcgagaaaaagattgaattttggtcagactggagacgcagactccgtacctgacccccagcctctcggacagccaccagcagccccctctggtctgggatctactacaatggcttcaggcagtggcgcaccagtggcagacaataacgagggtgccgatggagtgggtaattcctcaggaaattggcattgcgattcccaatggctgggcgacagagtcatcaccaccagcacccgaacctgggccctgcccacctacaacaaccacctctacaagcaaatctccagccaatcaggagcctcaaacgacaaccactactttggctacagcaccccctgggggtattttgacttcaacagattccactgccacttttcaccacgtgactggcaaagactcatcaacaacagctggggattccgacccaaaagactcaacttcaagctctttaacattcaagtcaaagaggtcacgcagaatgacggtacgacgacgattgccaataaccttaccagcacggttcaagtgtttaccgactcggagtaccagctcccgtacgtcctcggctcggcgcatcaaggatgcctcccgccgttcccagcagacgtctttatggtcccacagtatggatacctcaccctgaacaacgggagtcaggcggtaggacgctcttccttttactgcctggagtactttccttctcagatgctgcgtactggaaacaactttcagttcagctacacctttgaagacgttcccttccacagcagctacgctcacagccagagtctggatcggctgctgaatcctctgatcgaccagtacctatattatctgaacaagacacaatcaaatagtggaactcttcagcagtctcggctactgtttagccaagctggacccaccagcatgtctcttcaagctaaaaactggctgcctggaccttgctacagacagcagcgtctgtcaaagcaggcaaacgacaacaacaacagcaactttccctggactgcggctacaaagtatcatctaaatggccgggactcgttggttaatccaggaccagctatggccagccacaaagacgatgaagaaaagtttttccccatgcatggaaccctgatatttggtaaacaaggaacaaatgctaacgacgcggatttggacaatgtcatgattacagatgaagaagaaatccgcaccaccaatcccgtggctacggagcagtacggatatgtgtcaaataatttgcaaaactcaaatactggtccaactactggaactgtcaatcaccaaggagcgttacctggtatggtgtggcaggatcgagacgtgtacctgcagggacccatttgggccaagattcctcacacggacgggcactttcatccttctccactaatgggaggttttgggctcaaacacccgcctcctcagatcatgatcaaaaacactcccgttccagccaatcctcctacaaacttcagttcttccaagtttgcttctttcatcacacagtattccacggggcaggtcagcgtggagatcgagtgggagctgcagaaggagaacagcaaacgctggaatcccgaaattcagtatacttccaactacaacaaatctgttaatgtggactttactgtggacactaatggtgtgtattcagagcctcgccccattggcaccagatacccgactcgtaatctgtaa

SEQ ID NO: 2593 - protein, 735 aa, Artificial Sequence
  Synthetic polypeptide
MAADGYLPDWLEDTLSEGIRQWWKLKPGPPPPKPAERHKDDSRGLVLPGYKYLGPFNGLDKGEPVNEADAAALEHDKAYDRQLESGDNPYLKYNHADAEFQERLKEDTSFGGNLGRAVFQAKKRVLEPLGLVEEPVKTAPGKKRPVEHSPVEPDSSSGTGKAGQQPARKRLNFGQTGDADSVPDPQPLGQPPAAPSGLGSTTMASGSGAPVADNNEGADGVGNSSGNWHCDSQWLGDRVITTSTRTWALPTYNNHLYKQISSQSGASNDNHYFGYSTPWGYFDFNRFHCHFSPRDWQRLINNSWGFRPKRLNFKLFNIQVKEVTQNDGTTTIANNLTSTVQVFTDSEYQLPYVLGSAHQGCLPPFPADVFMVPQYGYLTLNNGSQAVGRSSFYCLEYFPSQMLRTGNNFQFSYTFEDVPFHSSYAHSQSLDRLLNPLIDQYLYYLNKTQSNSGTLQQSRLLFSQAGPTSMSLQAKNWLPGPCYRQQRLSKQANDNNNSNFPWTAATKYHLNGRDSLVNPGPAMASHKDDEEKFFPMHGTLIFGKQGTNANDADLDNVMITDEEEIRTTNPVATEQYGYVSNNLQNSNTGPTTGTVNHQGALPGMVWQDRDVYLQGPIWAKIPHTDGHFHPSPLMGGFGLKHPPPQIMIKNTPVPANPPTNFSSSKFASFITQYSTGQVSVEIEWELQKENSKRWNPEIQYTSNYNKSVNVDFTVDTNGVYSEPRPIGTRYPTRNL

SEQ ID NO: 2594 - DNA, 2208 bp, Artificial Sequence
  Synthetic polynucleotide
atggctgccgatggttatcttccagattggctcgaggacactctctctgaaggaataagacagtggtggaagctcaaacctggcccaccaccaccaaagcccgcagagcggcataaggacgacagcaggggtcttgtgcttcctgggtacaagtacctcggacccttcaacggactcgacaagggagagccggtcaacgaggcagacgccgcggccctcgagcacgacaaggcctacgaccggcagctcgacagcggagacaacccgtacctcaagtacaaccacgccgacgcggagtttcaggagcgtcttaaagaagatacgtcttttgggggcaacctcggacgagcagtcttccaggccaaaaagaggattcttgaacctctgggcctggttgaggaacctgttaagacggctccgggagaaaagaggccggtagagcactctcctgcggagccagactcctcctcgggaaccggaaaagcgggccagcagcctgcaagaaagagattgaattttggccagactggagacgcagactcagtacctgacccccagcctctcggacagccaccagcagccccctctggtctgggaactaatacgatggcttcaggcagtggcgcaccaatggcagacaataacgagggcgccgacggagtgggtaattcctcgggaaattggtattgcgattccacatggatgggcgacagagtcatcaccaccagcacccgcacctgggccctgcccacctacaacaaccatctgtacaagcaaatctccagccagtctggagccagcaacgacaaccactactttggctacagcaccccctgggggtattttgacttcaacagattccactgccacttctccccacgtgactggcaaagactcatcaacaacaactggggattccggcccaagagactcagcttcaagctctttaacattcaagtcaaagaggtcacgcagaatgacggtacgacgacgattgccaataaccttaccagcacggttcaggtgtttactgactcggagtaccagctcccgtacgtcctcggctcggcgcatcaaggatgcctcccgccgttcccagcagacgtcttcatggtgccacagtatggatacctcaccctgaacaacggcagtcaggcggtaggacgctcttccttttactgcctggagtactttccttctcagatgcttcgtaccggaaacaactttaccttcagctacacctttgaagacgttcctttccatagcagctacgctcacagccaaagtctggaccgtctcatgaatcctctcatcgaccagtacctgtattacttgagcagaacaaacactccaagcggaaccaccacgatgtccaggcttcagttttctcaggccggagcaagtgacattcgggaccagtctagaaactggcttcctggaccctgttaccgccagcagcgagtatcaaagacagctgcggacaacaacaacagtgattactcgtggactggagctaccaagtaccacctcaatggaagagactctctggtgaatccgggcccagctatggccagccacaaggacgatgaagaaaaatattttcctcagagcggggttctcatctttggaaaacaagactcgggaaaaactaatgtggacattgaaaaggttatgattacagacgaagaggaaatcaggaccaccaatcccgtggctacggagcagtatggttctgtatctaccaacctccagagcggcaacacacaagcagctacctcagatgtcaacacacaaggcgttcttccaggcatggtctggcaggacagagacgtgtacctgcaggggcccatctgggcaaagattccacacacggacggacattttcacccctctcccctcgtgggcggattcggacttaaacaccctcctccacaaattctcatcaagaacaccccggtacctgcgaatccttcgaccactttcagtgcggcaaagtttgcttccttcatcacacagtactccacggggcaggtcagcgtggagatcgagtgggagctgcagaaggagaacagcaaacgctggaatcccgaaattcagtacacttccaactacaacaaatctgttaatgtggactttactgtggacactaatggtgtgtattcagagcctcgccccattggcaccagatacctgactcgtaatctgtaa

SEQ ID NO: 2595 - protein, 735 aa, Artificial Sequence
  Synthetic polypeptide
MAADGYLPDWLEDTLSEGIRQWWKLKPGPPPPKPAERHKDDSRGLVLPGYKYLGPFNGLDKGEPVNEADAAALEHDKAYDRQLDSGDNPYLKYNHADAEFQERLKEDTSFGGNLGRAVFQAKKRILEPLGLVEEPVKTAPGEKRPVEHSPAEPDSSSGTGKAGQQPARKRLNFGQTGDADSVPDPQPLGQPPAAPSGLGTNTMASGSGAPMADNNEGADGVGNSSGNWYCDSTWMGDRVITTSTRTWALPTYNNHLYKQISSQSGASNDNHYFGYSTPWGYFDFNRFHCHFSPRDWQRLINNNWGFRPKRLSFKLFNIQVKEVTQNDGTTTIANNLTSTVQVFTDSEYQLPYVLGSAHQGCLPPFPADVFMVPQYGYLTLNNGSQAVGRSSFYCLEYFPSQMLRTGNNFTFSYTFEDVPFHSSYAHSQSLDRLMNPLIDQYLYYLSRTNTPSGTTTMSRLQFSQAGASDIRDQSRNWLPGPCYRQQRVSKTAADNNNSDYSWTGATKYHLNGRDSLVNPGPAMASHKDDEEKYFPQSGVLIFGKQDSGKTNVDIEKVMITDEEEIRTTNPVATEQYGSVSTNLQSGNTQAATSDVNTQGVLPGMVWQDRDVYLQGPIWAKIPHTDGHFHPSPLVGGFGLKHPPPQILIKNTPVPANPSTTFSAAKFASFITQYSTGQVSVEIEWELQKENSKRWNPEIQYTSNYNKSVNVDFTVDTNGVYSEPRPIGTRYLTRNL

SEQ ID NO: 2596 - DNA, 2209 bp, Artificial Sequence
  Synthetic polynucleotide
atggctgccgatggttatcctccagattggctcgaggacactctctctgaagggataagacagtggtggaagctcaaacctggcccaccaccaccaaagcccgcagagcggcataaggacgacagcaggggtcttgtgcttcctgggtacaagtacctcggacccttcaacggactcgacaagggggagccggtcaacgaggcagacgccgcggccctcgagcacgacaaggcctacgaccggcagctcgacagcggagacaacccgtacctcaagtacaaccacgccgacgcagagtttcaggagcgccttaaagaagatacgtcttttgggggcaacctcggacgagcagtcttccaggcgaaaaagagggttcttgaacctctgggcctggttgaggaacctgttaagacggctccgggaaaaaagaggccggtagagcactctcctgtggagccagactcctcctcgggaaccggaaaagcgggccagcggcctgcaagaaaaagattaaattttggtcagactggagacgcagactccgtacctgacccccagcctctcggacagccaccagcagccccctctggtctgggatctactacaatggctacaggcagtggcgcaccaatggcagacaataacgagggtgccgatggagtgggtaattcctcaggaaattggcattgcgattcccaatggctgggcgacagagtcatcaccaccagcacccgaacctgggccctgcccacatacaacaaccacctctacaagcaaatctccagccaatcaggagccagcaacgacaaccactactttggctacagcaccccctgggggtattttgacttcaacagattccactgccacttttcaccacgtgactggcaaagactcatcaacaacaactggggattccggcccaaaagactcaacttcaagctctttaatattcaagtcaaagaggtcacgcagaatgacggtacgacgacgattgccaataaccttaccagcacggttcaggtgtttactgactcggagtaccagctcccgtacgtcctgggctcggcgcatcaaggatgcctcccgccgtttccagcggacgtcttcatggtcccacagtatggatacctcaccctgaacaacgggagtcaggcggtaggacgctcttccttttactgcctggagtactttccttctcagatgctgcgtactggaaacaactttcagttcagctacacttttgaagacgtgcctttccacagcagctacgctcacagccagagtctggatcggctgatgaatcctctgatcgaccagtacctgtattatctgaacaagacacaaacaaatagtggaactcttcagcagtctcggctactgtttagccaagctggaccaaccaacatgtctcttcaagctaaaaactggctgcctggaccttgctacagacagcagcgtctgtcaaaacaggcaaacgacaacaacaacagcaactttccctggactgcagctacaaagtatcatctaaatggccgggactcgttggttaatccaggaccagctatggccagtcacaaggatgacgaagaaaagtttttccccatgcatggaaccctgatatttggtaaacaaggaacaaatgccaacgacgcggatttggaaaatgtcatgattacagatgaagaagaaatcagggccaccaatcccgtggctacggagcagtacgggactgtgtcaaataatttgcaaaactcaaacactggtccaactactggaactgtcaatcgccaaggagcgttacctggtatggtgtggcaggatcgagacgtgtacctgcagggacccatttgggccaagattcctcacaccgatggacactttcatccttctccactgatgggaggttttggactcaaacacccgcctcctcagatcatgatcaaaaacactcccgttccagccaatcctcccacaaacttcagttctgccaagtttgcttctttcatcacacagtattccacgggacaggtcagcgtggagatcgagtgggagctgcagaaggagaacagcaaacgctggaatcccgaaattcagtacacttccaactacaacaagtctgttaatgtggactttactgtggacactaatggtgtgtattcagagcctcgccccattggcaccagatacctgactcgtaatctgtaat

SEQ ID NO: 2597 - protein, 735 aa, Artificial Sequence
  Synthetic polypeptide
MAADGYPPDWLEDTLSEGIRQWWKLKPGPPPPKPAERHKDDSRGLVLPGYKYLGPFNGLDKGEPVNEADAAALEHDKAYDRQLDSGDNPYLKYNHADAEFQERLKEDTSFGGNLGRAVFQAKKRVLEPLGLVEEPVKTAPGKKRPVEHSPVEPDSSSGTGKAGQRPARKRLNFGQTGDADSVPDPQPLGQPPAAPSGLGSTTMATGSGAPMADNNEGADGVGNSSGNWHCDSQWLGDRVITTSTRTWALPTYNNHLYKQISSQSGASNDNHYFGYSTPWGYFDFNRFHCHFSPRDWQRLINNNWGFRPKRLNFKLFNIQVKEVTQNDGTTTIANNLTSTVQVFTDSEYQLPYVLGSAHQGCLPPFPADVFMVPQYGYLTLNNGSQAVGRSSFYCLEYFPSQMLRTGNNFQFSYTFEDVPFHSSYAHSQSLDRLMNPLIDQYLYYLNKTQTNSGTLQQSRLLFSQAGPTNMSLQAKNWLPGPCYRQQRLSKQANDNNNSNFPWTAATKYHLNGRDSLVNPGPAMASHKDDEEKFFPMHGTLIFGKQGTNANDADLENVMITDEEEIRATNPVATEQYGTVSNNLQNSNTGPTTGTVNRQGALPGMVWQDRDVYLQGPIWAKIPHTDGHFHPSPLMGGFGLKHPPPQIMIKNTPVPANPPTNFSSAKFASFITQYSTGQVSVEIEWELQKENSKRWNPEIQYTSNYNKSVNVDFTVDTNGVYSEPRPIGTRYLTRNL

SEQ ID NO: 2598 - DNA, 2208 bp, Artificial Sequence
  Synthetic polynucleotide
atggctgccgatggttatcttccagattggctcgaggacactctctctgaaggaataagacagtggtggaagctcaaacctggcccaccaccaccaaagcccgcagagcggcataaggacgacagcaggggtcttgtgcttcctgggtacaggtacctcggacccttcaacggactcgacaagggagagccggtcaacgaggcagacgccgcggccctcgagcacgacaaggcctacgaccggcagctcgacagcggagacaacccgtacctcaagtacaaccacgtcgacgcggagtttcaggagcgtcttaaagaagatacgtcttttgggggcaacctcggacgagcagtcttccaggccaaaaagaggattcttgaacctctgggcctggttgaggaacctgttaaggcggctccgggagaaaagaggccggtagagcactctcctgcggagccagactcctcctcgggaaccggaaaagcgggccagcagcctgcaagaaagagattgaattttggtcagactggagacgcagactcagtacctgacccccagcctctcggacagccaccagcagccccctctggtctgggaactaatacgatggcttcaggcagtggcgcaccaatggcagacaataacgagggcgccgacggagtgggtaattcctcgggaaattggcattgcgattccacatggatgggcgacagagtcatcaccaccagcacccgcacctgggccctgcccacctacaacaaccatctgtacaagcaaatctccagccagtctggagccagcaacgacaaccactactttggctacagcaccccctgggggcattttgacttcaacagattccactgccacttctccccacgtgactggcaaagactcatcaacaacaactggggattccggcccaagagactcagcttcaagctctttaacattcaagtcaaagaggtcacgcagaatgacggtacgacgacgattgccaataaccttaccagcacggttcaggtgtttactgactcggagtaccagctcccgtacgtcctcggctcggcgcatcaaggatgcctcccgccgttcccagcagacgtcttcatggtgccacagtatggatacctcaccctgaacaacggcagtcaggcggtaggacgctcttccttttactgcctggagtactttccttctcagatgcttcgtaccggaaacaactttaccttcagctacacctttgaagacgttcctttccatagcagctacgctcacagccaaagtctggaccgtctcatgaatcctctcatcgaccagtacctgtattacttgagcagaacaaacactccaagcggaaccaccacgatgtccaggcttcagttttctcaggccggagcaagtgacattcgggaccagtctagaaactggcttcctggaccctgttaccgccagcagcgagtatcaaagacagctgcggacaacaacaacagtgattactcgtggactggagctaccaagtaccacctcaatggaagagactctctggtgaatccgggcccagctatggccagccacaaggacgatgaagaaaaatattttcctcagagcggggttctcatctttggaaaacaagactcgggaaaaactaatgtggacattgaaaaggttatgattacagacgaagaggaaatcaggaccaccaatcccgtggctacggagcagtatggttctgtatctaccaacctccagagcggcaacacacaagcagctacctcagatgtcaacacacaaggcgttcttccaggcatggtctggcaggacagagacgtgtacctgcaggggcccatctgggcaaagattccacacacggacggacattttcacccctctccccccatgggcggattcggacttaaacaccctcctccacaaattctcatcaagaacaccccggtacctgcgaatccttcgaccactttcagtgcggcaaagtttgcttccttcatcacacagtactccacggggcaggtcagcgtggagatcgagtgggagctgcagaaggagaacagcaaacgctggaatcccgaaattcagtacacttccaactacaacaaatctgttaatgtggactttactgtggacactaatggtgtgtattcagagcctcgccccattggcgccagatacctgactcgtaatctgtaa

SEQ ID NO: 2599 - protein, 735 aa, Artificial Sequence
  Synthetic polypeptide
MAADGYLPDWLEDTLSEGIRQWWKLKPGPPPPKPAERHKDDSRGLVLPGYRYLGPFNGLDKGEPVNEADAAALEHDKAYDRQLDSGDNPYLKYNHVDAEFQERLKEDTSFGGNLGRAVFQAKKRILEPLGLVEEPVKAAPGEKRPVEHSPAEPDSSSGTGKAGQQPARKRLNFGQTGDADSVPDPQPLGQPPAAPSGLGTNTMASGSGAPMADNNEGADGVGNSSGNWHCDSTWMGDRVITTSTRTWALPTYNNHLYKQISSQSGASNDNHYFGYSTPWGHFDFNRFHCHFSPRDWQRLINNNWGFRPKRLSFKLFNIQVKEVTQNDGTTTIANNLTSTVQVFTDSEYQLPYVLGSAHQGCLPPFPADVFMVPQYGYLTLNNGSQAVGRSSFYCLEYFPSQMLRTGNNFTFSYTFEDVPFHSSYAHSQSLDRLMNPLIDQYLYYLSRTNTPSGTTTMSRLQFSQAGASDIRDQSRNWLPGPCYRQQRVSKTAADNNNSDYSWTGATKYHLNGRDSLVNPGPAMASHKDDEEKYFPQSGVLIFGKQDSGKTNVDIEKVMITDEEEIRTTNPVATEQYGSVSTNLQSGNTQAATSDVNTQGVLPGMVWQDRDVYLQGPIWAKIPHTDGHFHPSPPMGGFGLKHPPPQILIKNTPVPANPSTTFSAAKFASFITQYSTGQVSVEIEWELQKENSKRWNPEIQYTSNYNKSVNVDFTVDTNGVYSEPRPIGARYLTRNL

SEQ ID NO: 2600 - DNA, 2208 bp, Artificial Sequence
  Synthetic polynucleotide
atggctgccgatggttatcttccagattggctcgaggacaccctctctgaaggaataagacagtggtggaagctcaaacctggcccaccaccaccaaagcccgcagagcggcataaggacgacagcaggggtcttgtgcttcctgggtacaagtacctcggacccttcaacggactcgacaagggagagccggtcaacgaggcagacgccgcggccctcgagcacgacaaggcctacgaccggcagctcgacagcggagataacccgtacctcaagtacaaccacgccgacgcggagtttcaggagcgccttaaagaggatacgtcttttgggggcaacctcggacgagcagtcttccaggccaaaaagaggattcttgaacctctgggcctggttgaggaacctgttaagacggctccgggaaaaaagaggccggtagagcactctcctgcggagccagactcctcctcgggaaccggaaaagcgggccagcagcctgcaagaaagagattgaattttggtcagactggagacgcagactcagtacctgacccccggcctctcggacagccaccagcagccccctctggtctgggaactaatacgatggcttcaggcagtggcgcaccaatggcagacaataacgagggcgccgacggagtgggtaattcctcgggaaattggcattgcgattccacatggatgggcgacagagtcatcaccaccagcacccgcacctgggccctgcccacctacaacaaccatctgtacaagcaaatctccagccagtctggagccagcaacgacaaccactactttggctacagcaccccctgggggtattttgacttcaacagattccactgccacttctccccacgtgactggcaaagactcatcaacaacaactggggattccggcccaagagactcagcttcaagctctttaacattcaagtcaaagaggtcacgcagaatgacggtacgacgacgattgccaataaccttaccagcacggttcaggtgtttactgactcggagtaccagctcccgtacgtcctcggctcggcgcatcaaggatgcctcccgccgttcccagcagacgtcttcatggtgccacagtatggatacctcaccctgaacaacggcagtcaggcggtaggacgctcttccttttactgcctggagtactttccttctcagatgcttcgtaccggaaacaactttaccttcagctacacctttgaagacgttcctttccatagcagctacgctcacagccaaagtctggaccgtctcatgaatcctctcatcgaccagtacctgtattacttgagcagaacaaacactccaagcggaaccaccacgatgtccaggcttcagttttctcaggccggagcaagtgacattcgggaccagtctagaaactggcttcctggaccctgttaccgccagcagcgagtatcaaagacagctgcggacaacaacaacagtgattactcgtggactggagctaccaagtaccacctcaatggaagagactctctggtgaatccgggcccagctatggccagccacaaggacgatgaagaaaaatattttcctcagagcggggttctcatctttggaaaacaagactcgggaaaaactaatgtggacattgaaaaggttatgattacagacgaagaggaaatcaggaccaccaatcccgtggctacggagcagtatggttctgtatctaccaacctccagagcggcaacacacaagcagctacctcagatgtcaacacacaaggcgttcttccaggcatggtctggcaggacagagacgtgtacctgcaggggcccatctgggcaaagattccacacacggacggacattttcacccctctcccctcatgggcggattcggacttaaacaccctcctccacaaattctcatcaagaacaccccggtacctgcgaatccttcgaccactttcagtgcggcaaagtttgcttccttcatcacacagtactccacggggcaggtcagcgtggagatcgagtgggagctgcagaaggagaacagcaaacgctggaatcccgaaattcagtacacttccaactacaacaaatctgttaatgtggactttactgtggacactaatggtgtgtattcagagcctcgccccattggcaccagatacctgactcgtaatctgtaa

SEQ ID NO: 2601 - protein, 735 aa, Artificial Sequence
  Synthetic polypeptide
MAADGYLPDWLEDTLSEGIRQWWKLKPGPPPPKPAERHKDDSRGLVLPGYKYLGPFNGLDKGEPVNEADAAALEHDKAYDRQLDSGDNPYLKYNHADAEFQERLKEDTSFGGNLGRAVFQAKKRILEPLGLVEEPVKTAPGKKRPVEHSPAEPDSSSGTGKAGQQPARKRLNFGQTGDADSVPDPRPLGQPPAAPSGLGTNTMASGSGAPMADNNEGADGVGNSSGNWHCDSTWMGDRVITTSTRTWALPTYNNHLYKQISSQSGASNDNHYFGYSTPWGYFDFNRFHCHFSPRDWQRLINNNWGFRPKRLSFKLFNIQVKEVTQNDGTTTIANNLTSTVQVFTDSEYQLPYVLGSAHQGCLPPFPADVFMVPQYGYLTLNNGSQAVGRSSFYCLEYFPSQMLRTGNNFTFSYTFEDVPFHSSYAHSQSLDRLMNPLIDQYLYYLSRTNTPSGTTTMSRLQFSQAGASDIRDQSRNWLPGPCYRQQRVSKTAADNNNSDYSWTGATKYHLNGRDSLVNPGPAMASHKDDEEKYFPQSGVLIFGKQDSGKTNVDIEKVMITDEEEIRTTNPVATEQYGSVSTNLQSGNTQAATSDVNTQGVLPGMVWQDRDVYLQGPIWAKIPHTDGHFHPSPLMGGFGLKHPPPQILIKNTPVPANPSTTFSAAKFASFITQYSTGQVSVEIEWELQKENSKRWNPEIQYTSNYNKSVNVDFTVDTNGVYSEPRPIGTRYLTRNL

SEQ ID NO: 2602 - DNA, 2208 bp, Artificial Sequence
  Synthetic polynucleotide
atggctgccgatggttatcttccagattggctcgaggacactctctctgaaggaataagacagtggtggaagctcaaacctggcccaccaccaccaaagcccgcagagcggcataaggacgacagcaggggtcttgtgcttcctgggtacaagtacctcggacccttcaacggactcgacaagggagagccggtcaacgaggcagacgccgcggccctcgagcacgacaaggcctacgaccggcagctcgacagcggagacaacccgtacctcaagtacaaccacgccgacgcggagtttcaggagcgccttaaaggagatacgtcttttgggggcaacctcggacgagcagtcttccaggccaaaaagaggattcttgaacctctgggcctggttgaggaacctgttaagacggctccgggaaaaaagaggccggtagagcactctcctgcggagccagactcctcctcgggaaccggaaaagcgggccagcagcctgcaagaaagagattgaattttggtcagactggagacgcagactcagtacctgacccccagcctctcggacagccaccagcagccccctctggtctgggaactaatacgatggcttcaggcagtggcgcaccaatggcagacaataacgagggcgccgacggagtgggtaattcctcgggaaattggcattgcgattccacatggatgggcggcagagtcatcaccaccagcacccgcacctgggccctgcccacctacaacaaccatctgtacaagcaaatctccagccagtctggagccagcaacgacaaccactactttggctacagcaccccctgggggtattttgacttcaacagattccactgccacttctccccacgtgactggcaaagactcatcaacaacaactggggattccggcccaagagactcagcttcaagctctttaacattcaagtcaaagaggtcacgcagaatgacggtacgacgacgattgccaataaccttaccagcacggttcaggtgtttactgactcggagtaccagctcccgtacgtcctcggctcggcgcatcaaggatgcctcccgccgttcccagcagacgtcttcatggtgccacagtatggatacctcaccctgaacaacggcagtcaggcggtaggacgctcttccttttactgcctggagtactttccttctcagacgcttcgtaccggaaacaactttaccttcagctacacctttgaagacgttcctttccatagcagctacgctcacagccaaagtctggaccgtctcatgaatcctctcatcgaccagtacctgtattacttgagcagaacaaacactccaagcggaaccaccacgatgtccaggcttcagttttctcaggccggagcaagtgacattcgggaccagtctagaaactggcttcctggaccctgttaccgccagcagcgagtatcaaagacagctgcggacaacaacaacagtgattactcgtggactggagctaccaagtaccacctcaatggaagagactctctggtgaatccgggcccagctatggccagccacaaggacgatgaagaaaaatattttcctcagagcggggttctcatctttggaaaacaagactcgggaaaaactaatgtggacattgaaaaggttatgattacagacgaagaggaaatcaggaccaccaatcccgtggctacggagcagtatggttctgtatctaccaacctccagagcggcaacacacaagcagctacctcagatgtcaacacacaaggcgttcttccaggcatggtctggcaggacagagacgtgtacctgcaggggcccatctgggcaaagattccacacacggacggacattttcacccctctcccctcatgggcggattcggacttaaacaccctcctccacaaattctcatcaagaacaccccggtacctgcgaatccttcgaccactttcagtgcggcaaagtttgcttccttcatcacacagtactccacggggcaggtcagcgtggagatcgagtgggagctgcagaaggagaacagcaaacgctggaatcccgaaattcagtacacttccaactacaacaaatctgttaatgtggactttactgtggacactaatggtgtgtattcagagcctcgccccattggcaccagatacctgactcgtaatctgtaa

SEQ ID NO: 2603 - protein, 735 aa, Artificial Sequence
  Synthetic polypeptide
MAADGYLPDWLEDTLSEGIRQWWKLKPGPPPPKPAERHKDDSRGLVLPGYKYLGPFNGLDKGEPVNEADAAALEHDKAYDRQLDSGDNPYLKYNHADAEFQERLKGDTSFGGNLGRAVFQAKKRILEPLGLVEEPVKTAPGKKRPVEHSPAEPDSSSGTGKAGQQPARKRLNFGQTGDADSVPDPQPLGQPPAAPSGLGTNTMASGSGAPMADNNEGADGVGNSSGNWHCDSTWMGGRVITTSTRTWALPTYNNHLYKQISSQSGASNDNHYFGYSTPWGYFDFNRFHCHFSPRDWQRLINNNWGFRPKRLSFKLFNIQVKEVTQNDGTTTIANNLTSTVQVFTDSEYQLPYVLGSAHQGCLPPFPADVFMVPQYGYLTLNNGSQAVGRSSFYCLEYFPSQTLRTGNNFTFSYTFEDVPFHSSYAHSQSLDRLMNPLIDQYLYYLSRTNTPSGTTTMSRLQFSQAGASDIRDQSRNWLPGPCYRQQRVSKTAADNNNSDYSWTGATKYHLNGRDSLVNPGPAMASHKDDEEKYFPQSGVLIFGKQDSGKTNVDIEKVMITDEEEIRTTNPVATEQYGSVSTNLQSGNTQAATSDVNTQGVLPGMVWQDRDVYLQGPIWAKIPHTDGHFHPSPLMGGFGLKHPPPQILIKNTPVPANPSTTFSAAKFASFITQYSTGQVSVEIEWELQKENSKRWNPEIQYTSNYNKSVNVDFTVDTNGVYSEPRPIGTRYLTRNL

SEQ ID NO: 2604 - DNA, 2208 bp, Artificial Sequence
  Synthetic polynucleotide
atggctgccgatggttatcttccagattggctcgaggacactctctctgaaggaataagacagtggtggaagctcaaacctggcccaccaccaccaaagcccgcagagcggcataaggacgacagcaggggtcttgtgcttcctgggtacaagtacctcggacccttcaacggactcgacaagggagagccggtcaacgaggcagacgccgcggccctcgagcacgacaaggcctacgaccggcagctcgacagcggagacaacccgtacctcaagtacaaccacgccgacgcggagtttcaggagcgtcttaaagaagatacgtcttttgggggcaacctcggacgagcagtcttccaggccaaaaagaggattcttgaacctctgggcctggttgaggaacctgttaagacggctccgggaaaaaagaggccggtagagcactctcctgcggagccagactcctcctcgggaaccggaaaagcgggccagcagcctgcaagaaagagattgaattttggtcagactggagacgcagactcagtacctgacccccagcctctcggacagccaccagcagccccctctggtctgggaactaatacgatggcttcaggcagtggcgcaccaatggcagacaataacgagggcgccgacggagtgggtaattcctcgggaaattggcattgcgattccacatggatgggcgacagagtcatcaccaccagcacccgcacctgggccctgcccacctgcaacaaccatctgtacaagcaaatctccagccagtctggagccagcaacgacaaccactactttggctacagcaccccctgggggtattttgacttcaacagattccactgccacttctccccacgtgactggcaaagactcatcaacaacaactggggattccggcccaagagactcagcttcaagctctttaacattcaagtcaaagaggtcacgcagaatgacggtacgacgacgattgccaataaccttaccagcacggttcaggtgtttactgactcggagtaccagctcccgtacgtcctcggctcggcgcatcaaggatgcctcccgccgttcccagcagacgtcttcatggtgccacagtatggatacctcaccctgaacaacggcagtcaggcggtaggacgctcttccttttactgcctggagtattttccttctcagatgcttcgtaccggaaacaactttaccttcagctacacctttgaagacgttcctttccatagcagctacgctcacagccaaagtctggaccgtctcatgaatcctctcatcgaccagtacctgtattacttgagcagaacaaacactccaagcggaaccaccacgatgtccaggcttcagttttctcaggccggagcaagtgacattcgggaccagtctagaaactggcttcctggaccctgttaccgccagcagcgagtatcaaagacagctgcggacaacaacaacagtgattactcgtggactggagctaccaagtaccacctcaatggaagagactctctggtgaatccgggcccagctatggccagccacaaggacgatgaagaaaaatattttcctcagagcggggttctcatctttggaaaacaagactcgggaaaaactaatgtggacattgaaaaggttatgattacagacgaagaggaaatcaggaccaccaatcccgtggctacggagcagtatggttctgtatctacctacctccagagcggcaacacacaagcagctacctcagatgtcaacacacaaggcgttcttccaggcatggtctggcaggacagagacgtgtacctgcgggggcccatctgggcaaagattccacacacggacggacattttcacccctctcccctcatgggcggatttggacttaaacaccctcctccacaaattctcatcaagaacaccccggtacctgcgaatccttcgaccactttcagtgcggcaaagtttgcttccttcatcacacagtactccacggggcaggtcagcgtggagatcgagtgggagctgcagaaggagaacagcaaacgctggaatcccgaaattcagtacacttccaactacaacaaatctgttaatgtggactttactgtggacactaatggtgtgtattcagagcctcgccccattggcaccagatacctgactcgtaatctgtaa

SEQ ID NO: 2605 - protein, 735 aa, Artificial Sequence
  Synthetic polypeptide
MAADGYLPDWLEDTLSEGIRQWWKLKPGPPPPKPAERHKDDSRGLVLPGYKYLGPFNGLDKGEPVNEADAAALEHDKAYDRQLDSGDNPYLKYNHADAEFQERLKEDTSFGGNLGRAVFQAKKRILEPLGLVEEPVKTAPGKKRPVEHSPAEPDSSSGTGKAGQQPARKRLNFGQTGDADSVPDPQPLGQPPAAPSGLGTNTMASGSGAPMADNNEGADGVGNSSGNWHCDSTWMGDRVITTSTRTWALPTCNNHLYKQISSQSGASNDNHYFGYSTPWGYFDFNRFHCHFSPRDWQRLINNNWGFRPKRLSFKLFNIQVKEVTQNDGTTTIANNLTSTVQVFTDSEYQLPYVLGSAHQGCLPPFPADVFMVPQYGYLTLNNGSQAVGRSSFYCLEYFPSQMLRTGNNFTFSYTFEDVPFHSSYAHSQSLDRLMNPLIDQYLYYLSRTNTPSGTTTMSRLQFSQAGASDIRDQSRNWLPGPCYRQQRVSKTAADNNNSDYSWTGATKYHLNGRDSLVNPGPAMASHKDDEEKYFPQSGVLIFGKQDSGKTNVDIEKVMITDEEEIRTTNPVATEQYGSVSTYLQSGNTQAATSDVNTQGVLPGMVWQDRDVYLRGPIWAKIPHTDGHFHPSPLMGGFGLKHPPPQILIKNTPVPANPSTTFSAAKFASFITQYSTGQVSVEIEWELQKENSKRWNPEIQYTSNYNKSVNVDFTVDTNGVYSEPRPIGTRYLTRNL

SEQ ID NO: 2606 - DNA, 2208 bp, Artificial Sequence; identical to SEQ ID NO: 2600
  Synthetic polynucleotide

SEQ ID NO: 2607 - protein, 735 aa, Artificial Sequence; identical to SEQ ID NO: 2601
  Synthetic polypeptide

SEQ ID NO: 2608 - DNA, 2208 bp, Artificial Sequence
  Synthetic polynucleotide
atggctgccgatggttatcttccagattggctcgaggacactctctctgaaggaataagacagtggtggaagctcaaacctggcccaccaccaccaaagcccgcagagcggcataaggacggcagcaggggtcttgtgcttcctgggtacaagtacctcggacccttcaacggactcgacaagggagagccggtcaacgaggcagacgccgcggccctcgagcacgacaaggcctacgaccggcagctcaacagcggagacaacccgtacctcaagtacaaccacgccgacgcggagtttcaggagcgccttaaagaagatacgtcttttgggggcaacctcggacgagcagtcttccaggcaaaaaagagggttcttgaacctctgggcctggttgaggagcctgttaaaacggctccgggaaaaaagagaccggtagagcactctcctgcggagccagactcctcctcgggaaccggaaaagcgggccagcagcctgcaagaaagagattgaattttggtcagactggagacgcagactccgtacctgacccccagcctctcggacagccaccagcagccccctctggtctgggatctactacaatggctacaggcagtggcgcaccaatggcagacaataacgagggtgccgatggagtgggtaattcctcaggaaattggcattgcgattcccaatggctgggcgacagagtcatcaccacaagcactcgaacctgggccctgcccacctacaacaaccacctctacaagcaaatctccagccaatcaggagcctcaaacgacaaccactattttggctacagcaccccttgggggtattttgacttcaacagattccactgccacttttcaccacgtgactggcaaagactcatcaacaacaactggggattccgacccaagagactcaacttcaagctctttaacattcaagtcaaagaggtcacgcagaatgacggtacgacgacgattgccaataaccttaccagcacggttcaggtgtttactgactcggagtaccagctcccgtacgtcctcggctcggcgcatcaaggatgcctcccgccgttcccagcggacgtcttcatggtcccacagtatggatacctcaccctgaacaacgggagtcaggcggtaggacgctctcccttttactgcctggagtactttccttctcagatgctgcgtactggaaacaactttcagttcagctacacttttgaagacgtgcctttccacagcagctacgctcacagccagagtctggatcggctgatgaatcctctgatcgaccagtacctgtattatctgaacaagacacaaacaaatagtggaactcttcagcagtctcggctactgtttagccaagctggacccaccaacatgtctcttcaagctaaaaactggctgcctggaccttgctacagacagcagcgtctgtcaaagcaggcaaacgacaacaacaacagcaactttccctggactgcagctacaaagtatcatctaaatggccgggactcgttggttaatccaggaccagctatggccagtcacaaggatgacgaagaaaagtttttccccatgcatggaaccctgatatttggtaaacaaggaacaaatgccaacgacgcggatttggaaaatgtcatgattacagatgaagaagaaatcaggaccaccaatcccgtggctacggagcagtacgggactgtgtcaaataatttgcaaaactcaaacactggtccaactactggaactgtcaatcaccaaggagcgttacctggtatggtgtggcaggatcgagatgtgtaccttcagggacccatttgggccaagattcctcacaccgatggacactttcatccttctccactgatgggaggttttggactcaaacacccgcctcctcagattatgatcaaaaacactcccgttccagccaatcctcctacaaacttcagttctgccaagtttgcttctttcatcacacagtattccacggggcaggtcagcgtggagatcgagtgggagctgcagaaggagaacagcaaacgctggaatcccgaaattcagtacacttccaactacaacaaatctgttaatgtggactttactgtggacaataatggcgtgtactcagagcctcgccccattggcaccagatacctgactcgtaatctgtaa

SEQ ID NO: 2609 - protein, 735 aa, Artificial Sequence
  Synthetic polypeptide
MAADGYLPDWLEDTLSEGIRQWWKLKPGPPPPKPAERHKDGSRGLVLPGYKYLGPFNGLDKGEPVNEADAAALEHDKAYDRQLNSGDNPYLKYNHADAEFQERLKEDTSFGGNLGRAVFQAKKRVLEPLGLVEEPVKTAPGKKRPVEHSPAEPDSSSGTGKAGQQPARKRLNFGQTGDADSVPDPQPLGQPPAAPSGLGSTTMATGSGAPMADNNEGADGVGNSSGNWHCDSQWLGDRVITTSTRTWALPTYNNHLYKQISSQSGASNDNHYFGYSTPWGYFDFNRFHCHFSPRDWQRLINNNWGFRPKRLNFKLFNIQVKEVTQNDGTTTIANNLTSTVQVFTDSEYQLPYVLGSAHQGCLPPFPADVFMVPQYGYLTLNNGSQAVGRSPFYCLEYFPSQMLRTGNNFQFSYTFEDVPFHSSYAHSQSLDRLMNPLIDQYLYYLNKTQTNSGTLQQSRLLFSQAGPTNMSLQAKNWLPGPCYRQQRLSKQANDNNNSNFPWTAATKYHLNGRDSLVNPGPAMASHKDDEEKFFPMHGTLIFGKQGTNANDADLENVMITDEEEIRTTNPVATEQYGTVSNNLQNSNTGPTTGTVNHQGALPGMVWQDRDVYLQGPIWAKIPHTDGHFHPSPLMGGFGLKHPPPQIMIKNTPVPANPPTNFSSAKFASFITQYSTGQVSVEIEWELQKENSKRWNPEIQYTSNYNKSVNVDFTVDNNGVYSEPRPIGTRYLTRNL

SEQ ID NO: 2610 - DNA, 2208 bp, Artificial Sequence
  Synthetic polynucleotide
atggctgccgatggttatcttccagattggctcgaggacactctctctgaaggaataagacagtggtggaagctcaaacctggcccaccaccaccaaagcccgcagagcggcataaggacgacagcaggggtcttgtgcttcctgggtacaagtacctcggacccttcaacggactcgacaagggagagccggtcaacgaggcagacgccgcggccctcgagcacgacaaggcctacgaccggcagctcgacagcggagacaacccgtacctcaagtacaaccacgccgacgcggagtttcaggagcgtcttaaagaagatacgtcttttgggggcaacctcggacgagcagtcttccaggccaaaaagaggattcttgaacctctgggcctggttgaggaacctgttaagacggctccgggaaaaaagaggccggtagagcactctcctgcggagccagactcctcctcgggaaccggaaaagcgggccagcagcctgcaagaaagagattgaattttggtcagactggagacgcagactcagtacctgacccccagcctctcggacagccaccagcagccccctctggtctgggaactaatacgatggcttcaggcagtggcgcaccaatggcagacaataacgagggcgccgacggagtgggtaattcctcgggaaattggcattgcgattccacatggatgggcgacagagtcatcaccaccagcacccgcacctgggccctgcccacctacaacaaccatctgtacaagcaaatctccagccagtctggagccagcaacgacaaccactactttggctacagcaccccctgggggtattttgacttcaacagattccactgccacttctccccacgtgactggcaaagactcatcaacaacaactggggattccggcccaagagactcagcttcaagctctttaacattcaagtcaaagaggtcacgcagaatgacggtacgacgacgattgccaataaccttaccagcacggttcaggtgtttactgactcggagtaccagctcccgtacgtcctcggctcggcgcatcaaggatgcctcccgccgttcccagcagacgtcttcatggtgccacagtatggatacctcaccctgaacaacggcagtcaggcggtaggacgctcttccttttactgcctggagtactttccttctcagatgcttcgtaccggaaacaactttaccttcagctacacctttgaagacgttcctttccatagcagctacgctcacagccaaagtctggaccgtctcatgaatcctctcatcgaccagtacctgtattacttgagcagaacaaacactccaagcggaaccaccacgatgtccaggcttcagttttctcaggccggagcaagtgacattcgggaccagtctagaaactggcttcctggaccctgttaccgccagcagcgagtatcaaagacagctgcggacaacaacaacagtgattactcgtggactggagctaccaagtaccacctcaatggaagagactctctggtgaatccgggcccagctatggccagccacaaggacgatgaagaaaaatattttcctcagagcggggttctcatctttggaaaacaagactcgggaaaaactaatgtggacattgaaaaggttatgattacagacgaagaggaaatcaggaccaccaatcccgtggctacggagcagtatggttctgtatctaccaacctccagagcggcaacacacaagcagctacctcagatgtcaacacacaaggcgttcttccaggcatggtctggcaggacagagacgtgtacctgcaggggcccatctgggcaaagattccacacacggacggacattttcacccctctcccctcatgggcggattcggacttaaacaccctcctccacaaattctcatcaagaacaccccggtacctgcgaatccttcgaccactttcagtgcggcaaagtttgcttccttcatcacacagtactccacggggcaggtcagcgtggagatcgagtgggagctgcagaaggagaacagcaaacgctggaatcccgaaattcagtacacttccaactacaacaaatctgttaatgtggactttactgtggacactaatggtgtgtattcagagcctcgccccattggcaccagatacctgactcgtaatctgtaa

SEQ ID NO: 2611 - protein, 735 aa, Artificial Sequence
  Synthetic polypeptide
MAADGYLPDWLEDTLSEGIRQWWKLKPGPPPPKPAERHKDDSRGLVLPGYKYLGPFNGLDKGEPVNEADAAALEHDKAYDRQLDSGDNPYLKYNHADAEFQERLKEDTSFGGNLGRAVFQAKKRILEPLGLVEEPVKTAPGKKRPVEHSPAEPDSSSGTGKAGQQPARKRLNFGQTGDADSVPDPQPLGQPPAAPSGLGTNTMASGSGAPMADNNEGADGVGNSSGNWHCDSTWMGDRVITTSTRTWALPTYNNHLYKQISSQSGASNDNHYFGYSTPWGYFDFNRFHCHFSPRDWQRLINNNWGFRPKRLSFKLFNIQVKEVTQNDGTTTIANNLTSTVQVFTDSEYQLPYVLGSAHQGCLPPFPADVFMVPQYGYLTLNNGSQAVGRSSFYCLEYFPSQMLRTGNNFTFSYTFEDVPFHSSYAHSQSLDRLMNPLIDQYLYYLSRTNTPSGTTTMSRLQFSQAGASDIRDQSRNWLPGPCYRQQRVSKTAADNNNSDYSWTGATKYHLNGRDSLVNPGPAMASHKDDEEKYFPQSGVLIFGKQDSGKTNVDIEKVMITDEEEIRTTNPVATEQYGSVSTNLQSGNTQAATSDVNTQGVLPGMVWQDRDVYLQGPIWAKIPHTDGHFHPSPLMGGFGLKHPPPQILIKNTPVPANPSTTFSAAKFASFITQYSTGQVSVEIEWELQKENSKRWNPEIQYTSNYNKSVNVDFTVDTNGVYSEPRPIGTRYLTRNL

SEQ ID NO: 2612 - DNA, 2208 bp, Artificial Sequence
  Synthetic polynucleotide
atggctgccgatggttatcttccagattggctcgaggacactctctctgaaggaataagacagtggtggaagctcaaacctggcccaccaccaccaaagcccgcagagcggcataaggacgacagcaggggtcttgtgcttcctgggtacaagtacctcggacccttcaacggactcgacaagggagagccggtcaacgaggcagacgccgcggccctcgagcacgacaaggcctacgaccggcagctcgacagcggagacaacccgtacctcaagtacaaccacgccgacgcggagtttcaggagcgtcttaaagaagatacgtcttttgggggcaacctcggacgagcagtcttccaggccaaaaagaggattcttgaacctctgggcctggttgaggaacctgttaagacggctccgggaaaaaagaggccggtagagcactctcctgcggagccagactcctcctcgggaaccggaaaagcgggccagcagcctgcaagaaagagattgaattttggtcagactggagacgcagactcagtacctgacccccagcctctcggacagccaccagcagccccctctggtctgggaactaatacgatggcttcaggcagtggcgcaccaatggcagacaataacgagggcgccgacggagtgggtaattcctcgggaaattggcattgcgattccacatggatgggcgacagagtcatcaccaccagcacccgcacctgggccctgcccacctacaacaaccatctgtacaagcaaatctccagccagtctggagccagcaacgacaaccactactttggctacagcaccccctgggggtatttcgacttcaacagattccactgccacttctccccacgtgactggcaaagactcatcaacaacaactggggattccggcccaagagactcagcttcaagctctttaacattcaagtcaaagaggtcacgcagaatgacggtacgacgacgattgccaataaccttaccagcacggttcaggtgtttactgactcggggtaccagctcccgtacgtcctcggctcggcgcatcaaggatgccttccgccgttcccagcagacgtcttcatggtgccacagtatggatacctcaccctgaacaacggcagtcaggcggtaggacgctcttccttttactgcctggagtactttccttctcagatgcttcgtaccggaaacaactttaccttcagctacacctttgaagacgttcctttccatagcagctacgctcacggccaaagtctggaccgtctcatgaatcctctcatcgaccagtacctgtattacttgagcagaacaaacactccaagcggaaccaccacgatgtccaggcttcagttttctcaggccggagcaagtgacgttcgggaccagtctagaaactggcttcctggaccctgttaccgccagcagcgagtatcaaagacagctgcggacaacaacaacagtgattactcgtggactggagctaccaagtaccacctcaatggaagagactctctggtgaatccgggcccagctatggccagccacaaggacgatgaagaaaaatattttcctcagagcggggttctcgtctttggaaaacaagactcgggaaaaactaatgtggacattgaaaaggttatgattacagacgaagaggaaatcaggaccaccaatcccgcggctacggagcagtatggttctgtatctaccaacctccagagcggcaacacacaagcagctacctcagatgtcaacacacaaggcgttcttccaggcatggtctggcaggacagagacgtgtacctgcaggggcccatctgggcaaagattccacacacggacggacattttcacccctctcccctcatgggcggattcggacttaaacaccctcctccacaaattctcatcaagaacaccccggtacctgcgaatccttcgaccactttcagtgcggcaaagtttgtttccttcatcacacagtactccacggggcaggtcagcgtggagatcgagtgggagctgcagaaggagaacagcaaacgctggaatcccgaaattcagtacacttccaactacaacaaatctgttaatgtggactttactgtggacactaatggtgtgtattcagagcctcgccccattggcaccagatacctgactcgtaatctgtaa

SEQ ID NO: 2613 - protein, 735 aa, Artificial Sequence
  Synthetic polypeptide
MAADGYLPDWLEDTLSEGIRQWWKLKPGPPPPKPAERHKDDSRGLVLPGYKYLGPFNGLDKGEPVNEADAAALEHDKAYDRQLDSGDNPYLKYNHADAEFQERLKEDTSFGGNLGRAVFQAKKRILEPLGLVEEPVKTAPGKKRPVEHSPAEPDSSSGTGKAGQQPARKRLNFGQTGDADSVPDPQPLGQPPAAPSGLGTNTMASGSGAPMADNNEGADGVGNSSGNWHCDSTWMGDRVITTSTRTWALPTYNNHLYKQISSQSGASNDNHYFGYSTPWGYFDFNRFHCHFSPRDWQRLINNNWGFRPKRLSFKLFNIQVKEVTQNDGTTTIANNLTSTVQVFTDSGYQLPYVLGSAHQGCLPPFPADVFMVPQYGYLTLNNGSQAVGRSSFYCLEYFPSQMLRTGNNFTFSYTFEDVPFHSSYAHGQSLDRLMNPLIDQYLYYLSRTNTPSGTTTMSRLQFSQAGASDVRDQSRNWLPGPCYRQQRVSKTAADNNNSDYSWTGATKYHLNGRDSLVNPGPAMASHKDDEEKYFPQSGVLVFGKQDSGKTNVDIEKVMITDEEEIRTTNPAATEQYGSVSTNLQSGNTQAATSDVNTQGVLPGMVWQDRDVYLQGPIWAKIPHTDGHFHPSPLMGGFGLKHPPPQILIKNTPVPANPSTTFSAAKFVSFITQYSTGQVSVEIEWELQKENSKRWNPEIQYTSNYNKSVNVDFTVDTNGVYSEPRPIGTRYLTRNL

SEQ ID NO: 2614 - DNA, 2208 bp, Artificial Sequence
  Synthetic polynucleotide
atggctgccgatggttatcttccagattggctcgaggacactctctctgaaggaataagacagtggtggaaactcaaacctggcccaccaccaccaaagcccgcagagcggcataaggacgacagcaggggtcttgtgcttcctgggtacaagtacctcggacccttcaacggactcgacaagggagagccggtcaacgaggcagacgccgcggccctcgagcacgacaaggcctacgaccggcagctcgacagcggagacaacccgtacctcaagtacaaccacgccgacgcggagtttcaggagcgccttaaagaagatacgtcttttgggggcaacctcggacgagcagtcttccaggcaaaaaagagggttctggaacctctgagcctggttgaggagcctgttaagacggctccgggaaaaaagaggccggtagagcactctcccgcagagccagattcctcctccggaactggaaagtcgggcaaccagcctgcaagaaagagattgaatttcggtcagactggagactcagactccgtacctgacccccagcctctcggacagccaccagcagccccctctggtctgggaactaatacgatggctacaggcagtggcgcaccaatggcagacaataacgagggcgccgacggagtgggtaattcctcgggaaattggcattgcgattccacatggatgggcgacagagtcatcaccaccagcacccgaacctgggccctgcccacctacaacaaccatctgtacaagcaaatatccagccagtctggagccagcaacgacaatcactactttggctacagcaccccctgggggtattttgacttcaacagattccactgccacttttcaccacgtgactggcaaagactcatcaacaacaactggggattccgacccaagagactcaacttcaagctctttaacattcaagtcaaagaggtcacgcagaatgacggtacgacgacgattgccaataaccttaccagcacggttcaggtgtttactgactcggagtaccagctcccgtacgtcctcggctcggcgcatcaaggatgcctcccgccgttcccagcagacgtcttcatggtgccacagtatggatacctcaccctgaacaacgggagtcaggcagtaggacgctcttcattttactgcctagagtactttccttctcagatgctgcgtaccggaaacaactttaccttcagctacacctttgaggacgttcctttccacagcagctacgctcacagccagagtttggaccgtctcatgaatcctctcatcgaccagtacctgtattacttgagcagaacaaacactccaagcggaaccaccacgcagtccaggcttcagttttctcaggccggagcgagtgacattcaggaccagtctaggaactggcttcctggaccctgttaccgtcagcagcgagtatcaaagacatctgcggataacaacaacagtgaatactcgtggactggagctaccaagtaccacctcaatggcagagactctctggtgaatccgggcccggccatggccagccacaaagacgatgaagaaaagttttttcctcagagcggggttcttatctttgggaagcaaggctcagagaaaacaaatgtggatattgaaaaggtcatgattacagacgaagaggaaatcaggaccaccaatcccgtggctacggagcagtatggttctgtatctaccaacctccagagcggcaacacacaagcagctaccgcagatgtcaacacacaaggcgttcttccaggcatggtcgggcaagacagagacgtgtacctgcaggggcctacttgggcaaagattccacacacggacggacattttcacccctctcccctcatgggcggatttggacttaaacaccctcctccacagattctcatcaagaacaccccggtacctgcgaatccttcgaccaccttcagtgcggcaaagtttgcttccttcattacacagtactccacggggcaggtcagcgtggagatcgagtgggagctgcagaaggagaacagcaaacgctggaatcccgagatccagtacacttccaactacaacaagtctgttaatgtggactttactgtggacactaatggcgtgtattcagagcctcgccccattggcaccagatacctgactcgtaatctgtaa

SEQ ID NO: 2615 - protein, 735 aa, Artificial Sequence
  Synthetic polypeptide
MAADGYLPDWLEDTLSEGIRQWWKLKPGPPPPKPAERHKDDSRGLVLPGYKYLGPFNGLDKGEPVNEADAAALEHDKAYDRQLDSGDNPYLKYNHADAEFQERLKEDTSFGGNLGRAVFQAKKRVLEPLSLVEEPVKTAPGKKRPVEHSPAEPDSSSGTGKSGNQPARKRLNFGQTGDSDSVPDPQPLGQPPAAPSGLGTNTMATGSGAPMADNNEGADGVGNSSGNWHCDSTWMGDRVITTSTRTWALPTYNNHLYKQISSQSGASNDNHYFGYSTPWGYFDFNRFHCHFSPRDWQRLINNNWGFRPKRLNFKLFNIQVKEVTQNDGTTTIANNLTSTVQVFTDSEYQLPYVLGSAHQGCLPPFPADVFMVPQYGYLTLNNGSQAVGRSSFYCLEYFPSQMLRTGNNFTFSYTFEDVPFHSSYAHSQSLDRLMNPLIDQYLYYLSRTNTPSGTTTQSRLQFSQAGASDIQDQSRNWLPGPCYRQQRVSKTSADNNNSEYSWTGATKYHLNGRDSLVNPGPAMASHKDDEEKFFPQSGVLIFGKQGSEKTNVDIEKVMITDEEEIRTTNPVATEQYGSVSTNLQSGNTQAATADVNTQGVLPGMVGQDRDVYLQGPTWAKIPHTDGHFHPSPLMGGFGLKHPPPQILIKNTPVPANPSTTFSAAKFASFITQYSTGQVSVEIEWELQKENSKRWNPEIQYTSNYNKSVNVDFTVDTNGVYSEPRPIGTRYLTRNL

SEQ ID NO: 2616 - DNA, 2208 bp, Artificial Sequence
  Synthetic polynucleotide
atggctgccgatggttatcttccagattggctcgaggacactctctctgaaggaataagacagtggtggaagctcaaacctggcccaccaccaccaaagcccgcagagcggcataaggacgacagcaggggtcttgtgcttcctgggtacaagtacctcggacccttcaacggactcgacaagggagagccggtcaacgaggcagacgccgcggccctcgagcacgacaaggcctacgaccggcagctcgacagcggagacaacccgtacctcaagtacaaccacgccgacgcagagtttcaggagcgccttaaagaagatacgtcttttgggggcaacctcggacgagcagtcttccaggcaaaaaagagggttctggaacctctgggcctggttgaggagcctgttaagacggctccgggaaaaaagaggccggtagagcactctcctgcagagccagattcctcctccggaactggaaagtcgggcaaccagcctgcaagaaagagattgaatttcggtcagactggagactcagactccgtacctgacccccagcctctcggacagccaccagcagccccctctggtctgggaactaatacgatggctacaggcagtggcgcaccaatggcagacaataacgagggcgccgacggagtgggtaattcctcgggaaattggcattgcgattccacatggatgggcgacagagtcatcaccaccagcacccgaacctgggccctgcccacctacaacaaccatctgtacaagcaaatatccagccagtctggagccagcaacgacaatcactactttggctacagcaccccctgggggtattttgacttcaacagattccactgccacttttcaccacgtgactggcaaagactcatcaacaacaactggggattccgacccaagagactcaacttcaagctctttaacattcaagtcaaagaggtcacgcagaatgacggtacgacgacgattgccaataaccttaccagcacggttcaggtgtttactgactcggagtaccagctcccgtacgtcctcggctcggcgcatcaaggatgcctcccgccgttcccagcagacgtcttcatggtgccacagtatggatacctcaccctgaacaacgggagtcaggcagtaggacgctcttcattttactgcctagggtactttccttctcagatgctgcgtaccggaaacaactttaccttcagctacacctttgaggacgttcctttccacagcagctacgctcacagccagagtttggaccgtctcatgaatcctctcatcgaccagtacctgtattacttgagcagaacaaacactccaagcggaaccaccacgcagtccaggcttcagttttctcaggccggagcgagtgacattcgggaccagtctaggaactggcttcctggaccctgttaccgtcagcagcgagtatcaaagacatctgcggataacaacaacagtgaatactcgtggactggagctaccaagtaccacctcaatggcagagactctctggtgaatccgggcccggccatggccagccacaaagacgatgaagaaaagttttttcctcagagcggggttcttatctttgggaagcaaggcccagagaaaacaaatgtggatattgaaaaggtcatgattacagacgaagaggaaatcaggaccaccaatcccgtggctacggagcagtatggttctgtatctaccaacctccagagcggcaacacacaagcagctaccgcagatgtcaacacacaaggcgttcttccaggcatggtctggcaagacagagacgtgtacctgcaggggcctatttgggcaaagattccacacacggacggacattttcacccctctcccctcatgggcggatttggacttaaacaccctcctccacagattctcatcaagaacaccccggtacctgcgaatccttcgaccaccttcagtgcggcaaagtttgcttccttcattacacagtactccacggggcaggtcagcgtggagatcgagtgggagctgcagaaggagaacagcaaacgctggaatcccgagatccagtacacttccaactacaacaagtctgttaatgtggactttactgtggacactaatggcgtgtattcagagcctcgccccattggcaccagatacctgactcgtaatctgtaa

SEQ ID NO: 2617 - protein, 735 aa, Artificial Sequence
  Synthetic polypeptide
MAADGYLPDWLEDTLSEGIRQWWKLKPGPPPPKPAERHKDDSRGLVLPGYKYLGPFNGLDKGEPVNEADAAALEHDKAYDRQLDSGDNPYLKYNHADAEFQERLKEDTSFGGNLGRAVFQAKKRVLEPLGLVEEPVKTAPGKKRPVEHSPAEPDSSSGTGKSGNQPARKRLNFGQTGDSDSVPDPQPLGQPPAAPSGLGTNTMATGSGAPMADNNEGADGVGNSSGNWHCDSTWMGDRVITTSTRTWALPTYNNHLYKQISSQSGASNDNHYFGYSTPWGYFDFNRFHCHFSPRDWQRLINNNWGFRPKRLNFKLFNIQVKEVTQNDGTTTIANNLTSTVQVFTDSEYQLPYVLGSAHQGCLPPFPADVFMVPQYGYLTLNNGSQAVGRSSFYCLGYFPSQMLRTGNNFTFSYTFEDVPFHSSYAHSQSLDRLMNPLIDQYLYYLSRTNTPSGTTTQSRLQFSQAGASDIRDQSRNWLPGPCYRQQRVSKTSADNNNSEYSWTGATKYHLNGRDSLVNPGPAMASHKDDEEKFFPQSGVLIFGKQGPEKTNVDIEKVMITDEEEIRTTNPVATEQYGSVSTNLQSGNTQAATADVNTQGVLPGMVWQDRDVYLQGPIWAKIPHTDGHFHPSPLMGGFGLKHPPPQILIKNTPVPANPSTTFSAAKFASFITQYSTGQVSVEIEWELQKENSKRWNPEIQYTSNYNKSVNVDFTVDTNGVYSEPRPIGTRYLTRNL

SEQ ID NO: 2618 - protein, 735 aa, Artificial Sequence
  Synthetic polypeptide
MAADGYLPDWLEDTLSEGIRQWWKLKPGPPPPKPAERHKDDSRGLVLPGYKYLGPFNGLDKGEPVNEADAAALEHDKAYDRQLDSGDNPYLKYNHADAEFQERLKEDTSFGGNLGRAVFQAKKRVLEPLGLVEEPVKTAPGKKRPVEHSPAEPDSSSGTGKSGNQPARKRLNFGQTGDSDSVPDPQPLGQPPAAPSGLGTNTMATGSGAPMADNNEGADGVGNSSGNWHCDSTWMGDRVITTSTRTWALPTYNNHLYKQISSQSGASNDNHYFGYSTPWGYFDFNRFHCHFSPRDWQRLINNNWGFRPKRLNFKLFNIQVKEVTQNDGTTTIANNLTSTVQVFTDSEYQLPYVLGSAHQGCLPPFPADVFMVPQYGYLTLNNGSQAVGRSSFYCLEYFPSQMLRTGNNFTFSYTFEDVPFHSSYAHSQSLDRLMNPLIDQYLYYLSRTNTPSGTTTQSRLQFSQAGASDIRDQSRNWLPGPCYRQQRVSKTSADNNNSEYSWTGATKYHLNGRDSLVNPGPAMASHKDDEEKFFPQSGVLIFGKQGPEKTNVDIEKVMITDEEEIRTTNPVATEQYGSVSTNLQSGNTQAATADVNTQGVLPGMVWQDRDVYLQGPIWAKIPHTDGHFHPSPLMGGFGLKHPPPQILIKNTPVPANPSTTFSAAKFASFITQYSTGQVSVEIEWELQKENSKRWNPEIQYTSNYNKSVNVDFTVDTNGVYSEPRPIGTRYLTRNL

SEQ ID NO: 2619 - protein, 735 aa, Artificial Sequence; identical to SEQ ID NO: 2618
  Synthetic polypeptide

SEQ ID NO: 2620 - DNA, 2211 bp, Artificial Sequence
  Synthetic polynucleotide
atggctgccgatggttatcttccagattggctcgaggacactctctctgaaggaataagacagtggtggaagctcaaacctggcccaccaccaccaaagcccgcagagcggcataaggacgacagcaggggtcttgtgcttcctgggtacaagtacctcggacccttcaacggactcgacaagggggagccggtcaacgaggcagacgccgcggccctcgagcacgacaaggcctacgaccggcagctcgacagcggagacaacccgtacctcaagtacaaccacgccgacgcagagtttcaggagcgccttaaagaagatacgtcttttgggggcaacctcggacgagcagtcttccaggcgaaaaagagggttcttgaacctctgcggcctggtttgaggaaacctgttaagacggctccgggaaaaaagaggccggtagagcactctcctgtggagccagactcctcctcgggaaccggaaaagcgggccagcagcctgcaagaaaaagattaaattttggtcagactggagacgcagactccgtacctgacccccagcctctcggacagccaccagcagccccctctggtctgggatctactacaatggctacaggcagtggcgcaccaatggcagacaataacgagggtgccgatggagtgggtaattcctcaggaaattggcattgcgattcccaatggctggacgacagagtcatcgccaccagcacccgaacctgggccctgcccacatacaacaaccacctctacaagcaaatctccagccaatcaggagcctgcaacgacaaccactactttggctacagcaccccctgggggtattttgacttcaacagattccactgccacttttcaccacgtgactggcaaagactcatcaacagcaactggggattccggcccaaaagactcaacttcaagctctttaatattcaagtcaaagaggtcacgcagaatgacggtacgacgacgattgccaataaccttaccagcacggttcaggtgtttactgactcggagtaccagctcccgtacgtcccgggctcggcgcatcaaggatgcctcccgccgtttccagcggacgtcttcatggtcccacagtatggatacctcaccctgaacaacgggagtcaggcggtaggacgctcttccttttactgcctggagtactttccttctcagatgctgcgtactggaaacaactttcagttcagctacacttttgaagacgtgcctttccacagcagctacgctcactgccagagtctggatcggctgatgaatcctctgatcgaccagtacctgtattatctgaacaagacacaaacaaatagtggaactcttcagcagtctcggctactgtttagccaagctggaccaaccaacatgtctcttcaagctaaaaactggctgcctggaccttgctacagacagcagcgtctgtcaaaacaggcaaacgacaataacaactgcaactttccctggactgcagctacaaagtatcatctaaatggccgggactcgttggttaatccaggaccagctatggccagtcacaaggatgacgaagaaaagtttttccccatgcatggaaccctgatatttggtaaacaaggaacaaatgccaacgacgcggatttggaaaatgtcatgattacagatgaagaagaaatcaggcccaccaatcccgtggctacggagcagtacgggactgtgtcaaataatttgcaaaactcaaacactggtccaactacaggaactgtcaatcaccaaggagcgttacctggtatggtgtggcaggatcgagacgtgtacctgcagggacccatttgggccaagattcctcacaccgatggacactttcatccttctccactgatgggaggttttggactcaaacacccgcctcctcagatcatgatcaaaagcactcccgttccagccaatcctcccacaaacttcagttctgccaagtttgcttcttccatcacacagtattccacgggacaggtcagcgtggagatcgagtgggagctgcagaaggagaacagcaaacgctggaatcccgaaattcagtacacttccaactacaacaagtctgttaatgtggactttactgtggacactaatggtgtgtattcagagcctcgccccattggcaccagatacctgactcgtaatctgtaa

SEQ ID NO: 2621 - protein, 736 aa, Artificial Sequence
  Synthetic polypeptide
MAADGYLPDWLEDTLSEGIRQWWKLKPGPPPPKPAERHKDDSRGLVLPGYKYLGPFNGLDKGEPVNEADAAALEHDKAYDRQLDSGDNPYLKYNHADAEFQERLKEDTSFGGNLGRAVFQAKKRVLEPLRPGLRKPVKTAPGKKRPVEHSPVEPDSSSGTGKAGQQPARKRLNFGQTGDADSVPDPQPLGQPPAAPSGLGSTTMATGSGAPMADNNEGADGVGNSSGNWHCDSQWLDDRVIATSTRTWALPTYNNHLYKQISSQSGACNDNHYFGYSTPWGYFDFNRFHCHFSPRDWQRLINSNWGFRPKRLNFKLFNIQVKEVTQNDGTTTIANNLTSTVQVFTDSEYQLPYVPGSAHQGCLPPFPADVFMVPQYGYLTLNNGSQAVGRSSFYCLEYFPSQMLRTGNNFQFSYTFEDVPFHSSYAHCQSLDRLMNPLIDQYLYYLNKTQTNSGTLQQSRLLFSQAGPTNMSLQAKNWLPGPCYRQQRLSKQANDNNNCNFPWTAATKYHLNGRDSLVNPGPAMASHKDDEEKFFPMHGTLIFGKQGTNANDADLENVMITDEEEIRPTNPVATEQYGTVSNNLQNSNTGPTTGTVNHQGALPGMVWQDRDVYLQGPIWAKIPHTDGHFHPSPLMGGFGLKHPPPQIMIKSTPVPANPPTNFSSAKFASSITQYSTGQVSVEIEWELQKENSKRWNPEIQYTSNYNKSVNVDFTVDTNGVYSEPRPIGTRYLTRNL

SEQ ID NO: 2622 - DNA, 2208 bp, Artificial Sequence
  Synthetic polynucleotide
atggctgccgatggttatcttccagattggctcgaggacactctctctgaaggaataagacagtggtggaagctcaaacctggcccaccaccaccaaagcccgcagagcggcataaggacgacagcaggggtcttgtgcttcctgggtacaagtacctcggacccttcaacggactcgacaagggagagccggtcaacgaggcagacgccgcggccctcgagcacgacaaggcctacgaccggcagctcgacagcggagacaacccgtacctcaagtacaaccacgccgacgcggagtttcaggagcgccttaaagaggatacgtcttttgggggcaacctcggacgagcagtcttccaggcaaaaaagagggttctggaacctctgggcctggttgaggagcctgttaagacggctccgggaaaaaagaggccggtagagcactctcctgcagagccagattcctcctccggaactggaaagtcgggcaaccagcctgcaagaaagagattgaatttcggtcagactggagactcagactccgtacctgacccccagcctctcggacagccaccagcagccccctctggtctgggaactaatacgatggctacaggcagtggcgcaccaatggcagacaataacgagggcgccgacggagtgggtaattcctcgggaaattggcattgcgattccacatggatgggcgacagagtcatcaccaccagcacccgaacctgggccctgcccacctacaacaaccatctgtacaagcaaatatccagccagtctggagccagcaacgacaatcactactttggctacagcaccccctgggggtattttgacttcaacagattccactgccacttttcaccacgtgactggcaaagactcatcaacaacaactggggattccgacccaagagactcaacttcaagctctttaacattcaagtcaaagaggtcacgcagaatgacggtacgacgacgattgccaataaccttaccagcacggttcaggtgtttactgactcggagtaccagctcccgtacgtcctcggctcggcgcatcaaggatgcctcccgccgttcccagcagacgtcttcatggtgccacagtatggatacctcaccctgaacaacgggagtcaggcagtaggacgctcttcattttactgcctagagtactttccttctcagatgctgcgtaccggaaacagctttaccttcagctacacctttgaggacgttcctttccacagcagctacgctcacagccagagtttggaccgtctcatgaatcctctcatcgaccagtacctgtattacttgagcagaacaaacactccaagcggaaccaccacgcagtccaggcttcagttttctcaggccggagcgagtgacattcgggaccagtctaggaactggcttcctggaccctgttaccgtcagcagcgagtatcaaagacatctgcggataacaacaacagtgaatactcgtggactggagctaccaagtaccacctcaatggcagagactctctggtgaatccgggcccggccatggccagccacaaagacgatgaagaaaagttctttcctcagagcggggttcttatctttgggaagcaaggctcagagaaaacaaatgtggatattgaaaaggtcatgattacagacgaagaggaaatcaggaccaccaatcccgtggctacggagcagtatggttctgtatctaccaacctccagagcggcaacacacaagcagctaccgcagatgtcaacacacaaggcgttcttccaggcatggtctggcaagacagagacgtgtacctgcaggggcctatttgggcaaagattccacacacggacggacattttcacccctctcccctcatgggcggatttggacttaaacaccctcctccacagattctcatcaagaacaccccggtacctgcgaatccttcgaccaccttcagtgcggcaaagtttgcttccttcattacacagtactccacggggcaggtcagcgtggagatcgagtgggagctgcagaaggagaacagcaaacgctggaatcccgagatccagtacacttccaactacaacaagtctgttaatgtggactttactgtggacactaatggcgtgtattcagagcctcgccccattggcaccagatacctgactcgtaatctgtaa

SEQ ID NO: 2623 - protein, 735 aa, Artificial Sequence
  Synthetic polypeptide
MAADGYLPDWLEDTLSEGIRQWWKLKPGPPPPKPAERHKDDSRGLVLPGYKYLGPFNGLDKGEPVNEADAAALEHDKAYDRQLDSGDNPYLKYNHADAEFQERLKEDTSFGGNLGRAVFQAKKRVLEPLGLVEEPVKTAPGKKRPVEHSPAEPDSSSGTGKSGNQPARKRLNFGQTGDSDSVPDPQPLGQPPAAPSGLGTNTMATGSGAPMADNNEGADGVGNSSGNWHCDSTWMGDRVITTSTRTWALPTYNNHLYKQISSQSGASNDNHYFGYSTPWGYFDFNRFHCHFSPRDWQRLINNNWGFRPKRLNFKLFNIQVKEVTQNDGTTTIANNLTSTVQVFTDSEYQLPYVLGSAHQGCLPPFPADVFMVPQYGYLTLNNGSQAVGRSSFYCLEYFPSQMLRTGNSFTFSYTFEDVPFHSSYAHSQSLDRLMNPLIDQYLYYLSRTNTPSGTTTQSRLQFSQAGASDIRDQSRNWLPGPCYRQQRVSKTSADNNNSEYSWTGATKYHLNGRDSLVNPGPAMASHKDDEEKFFPQSGVLIFGKQGSEKTNVDIEKVMITDEEEIRTTNPVATEQYGSVSTNLQSGNTQAATADVNTQGVLPGMVWQDRDVYLQGPIWAKIPHTDGHFHPSPLMGGFGLKHPPPQILIKNTPVPANPSTTFSAAKFASFITQYSTGQVSVEIEWELQKENSKRWNPEIQYTSNYNKSVNVDFTVDTNGVYSEPRPIGTRYLTRNL

SEQ ID NO: 2624 - DNA, 2211 bp, Artificial Sequence; identical to SEQ ID NO: 2514
  Synthetic polynucleotide

SEQ ID NO: 2625 - protein, 736 aa, Artificial Sequence
  Synthetic polypeptide
MAADGYLPDWLEDTLSEGIRQWWKLKPGPPPPKPAERHKDDSRGLVLPGYKYLGPGNGLDKGEPVNAADAAALEHDKAYDQQLKAGDNPYLKYNHADAEFQERLKEDTSFGGNLGRAVFQAKKRLLEPLGLVEEAAKTAPGKKRPVEQSPQEPDSSAGIGKSGSQPAKKKLNFGQTGDTESVPDPQPIGEPPAAPSGVGSLTMASGGGAPVADNNEGADGVGSSSGNWHCDSQWLGDRVITTSTRTWALPTYNNHLYKQISNSTSGGSSNDNAYFGYSTPWGYFDFNRFHCHFSPRDWQRLINNNWGFRPKRLNFKLFNIQVKEVTDNNGVKTIANNLTSTVQVFTDSDYQLPYVLGSAHEGCLPPFPADVFMIPQYGYLTLNDGGQAVGRSSFYCLEYFPSQMLRTGNNFQFSYEFENVPFHSSYAHSQSLDRLMNPLIDQYLYYLSKTINGSGQNQQTLKFSVAGPSNMAVQGRNYIPGPSYRQQRVSTTVTQNNNSEFAWPGASSWALNGRNSLMNPGPAMASHKEGEDRFFPLSGSLIFGKQGTGRDNVDADKVMITNEEEIKTTNPVATESYGQVATNHQSAQAQAQTGWVQNQGILPGMVWQDRDVYLQGPIWAKIPHTDGNFHPSPLMGGFGMKHPPPQILIKNTPVPADPPTAFNKDKLNSFITQYSTGQVSVEIEWELQKENSKRWNPEIQYTSNYYKSNNVEFAVSTEGVYSEPRPIGTRYLTRNL

SEQ ID NO: 2626 - DNA, 2211 bp, Artificial Sequence
  Synthetic polynucleotide
atggctgccgatggttatcttccagattggctcgaggacactctctctgaaggaataagacagtggtggaagctcaaacctggcccaccaccaccaaagcccgcagagcggcataaggacgacagcaggggtcttgtgcttcctgggtacaagtacctcggacccggcaacggactcgacaagggggagccggtcaacgcagcagacgcggcggccctcgagcacgacaaggcctacgaccagcagctcaaggccggagacaacccgtacctcaagtacaaccacgccgacgccgagttccaggagcggctcaaagaagatacgtcttttgggggcaacctcgggcgagcagtcttccaggccaaaaagaggcttcttgaacctcttggtctggttgaggaagcggctaagacggctcctggaaagaagaggcctgtagagcagtctcctcaggaaccggactcctccgcgggtattggcaaatcgggttcacagcccgctaaaaagaaactcaatttcggtcagactggcgacacagagtcagtccccgaccctcaaccaatcggagaacctcccgcagccccctcaggtgtgggatctcttacaatggcttcaggtggtggcgcaccagtggcagacaataacgaaggtgccgatggagtgggtagttcctcgggaaattggcattgcgattcccaatggctgggggacagagtcatcaccaccagcacccgaacctgggccctgcccacctacaacaatcacctctacaagcaaatctccaacagcacatctggaggatcttcaaatgacaacgcctacttcggctacagcaccccctgggggtattttgacttcaacagattccactgccacttctcaccacgtgactggcagcgactcatcaacaacaactggggattccggcctaagcgactcaacttcaagctcttcaacattcaggtcaaagaggttacggacaacaatggagtcaagaccatcgccaataaccttaccagcacggtccaggtcttcacggactcagactatcagctcccgtacgtgctcgggtcggctcacgagggctgcctcccgccgttcccagcggacgttttcatgattcctcagtacgggtatctgacgcttaatgatgggagccaggccgtgggtcgttcgtccttttactgcctggaatatttcccgtcgcaaatgctaagaacgggtaacaacttccagttcagctacgagtttgagaacgtacctttccatagcagctacgctcacagccaaagcctggaccgactaatgaatccactcatcgaccaatacttgtactatctctcaaagactattaacggttctggacagaatcaacaaacgctaaaattcagcgtggccggacccagcaacatggctgtccagggaagaaactacatacctggacccagctaccgacaacaacgtgtctcaaccactgtgactcaaaacaacaacagcgaatttgcttggcctggagcttcttcttgggctctcaatggacgtaatagcttgatgaatcctggacctgctatggccagccacaaagaaggagaggaccgtttctttcctttgtctggatctttaatttttggcaaacaaggaactggaagagacaacgtggatgcggacaaagtcatgataaccaacgaagaagaaattaaaactactaacccggtagcaacggagtcctatggacaagtggccacaaaccaccagagtgcccaagcacaggcgcagaccggctgggttcaaaaccaaggaatacttccgggtatggtttggcaggacagagatgtgtacctgcaaggacccatttgggccaaaattcctcacacggacggcaactttcacccttctccgctaatgggagggtttggaatgaagcacccgcctcctcagatcctcatcaaaaacacacctgtacctgcggatcctccaacggctttcaataaggacaagctgaactctttcatcacccagtattctactggccaagtcagcgtggagattgagtgggagctgcagaaggaaaacagcaagcgctggaacccggagatccagtacacttccaactattacaagtctaataatgttgaatttgctgttaatactgaaggtgtatatagtgaaccccgccccattggcaccagatacctgactcgtaatctgtaa

SEQ ID NO: 2627 - protein, 736 aa, Artificial Sequence
  Synthetic polypeptide
MAADGYLPDWLEDTLSEGIRQWWKLKPGPPPPKPAERHKDDSRGLVLPGYKYLGPGNGLDKGEPVNAADAAALEHDKAYDQQLKAGDNPYLKYNHADAEFQERLKEDTSFGGNLGRAVFQAKKRLLEPLGLVEEAAKTAPGKKRPVEQSPQEPDSSAGIGKSGSQPAKKKLNFGQTGDTESVPDPQPIGEPPAAPSGVGSLTMASGGGAPVADNNEGADGVGSSSGNWHCDSQWLGDRVITTSTRTWALPTYNNHLYKQISNSTSGGSSNDNAYFGYSTPWGYFDFNRFHCHFSPRDWQRLINNNWGFRPKRLNFKLFNIQVKEVTDNNGVKTIANNLTSTVQVFTDSDYQLPYVLGSAHEGCLPPFPADVFMIPQYGYLTLNDGSQAVGRSSFYCLEYFPSQMLRTGNNFQFSYEFENVPFHSSYAHSQSLDRLMNPLIDQYLYYLSKTINGSGQNQQTLKFSVAGPSNMAVQGRNYIPGPSYRQQRVSTTVTQNNNSEFAWPGASSWALNGRNSLMNPGPAMASHKEGEDRFFPLSGSLIFGKQGTGRDNVDADKVMITNEEEIKTTNPVATESYGQVATNHQSAQAQAQTGWVQNQGILPGMVWQDRDVYLQGPIWAKIPHTDGNFHPSPLMGGFGMKHPPPQILIKNTPVPADPPTAFNKDKLNSFITQYSTGQVSVEIEWELQKENSKRWNPEIQYTSNYYKSNNVEFAVNTEGVYSEPRPIGTRYLTRNL

SEQ ID NO: 2628 - DNA, 2208 bp, Artificial Sequence
  Synthetic polynucleotide
atggctgccgatggttatcttccagattggctcgaggacactctctctgaaggaataagacagcggtggaagctcaaacctggcccaccaccaccagagcccgcagagcggcataaggacgacagcaggggtcttgtgcttcctgggtacaagtacctcggacccttcaacggactcgacaagggagagccggtcaacgaggcagacgccgcggccctcgagcacgacaaagcctacgaccggcagctcgacagcggagacaacccgtacctcaagtacaaccacgccgacgcggagtttcaggagcgccttaaagaagatacgtcttttgggggcaacctcggacgagcagtcttccaggcgaaaaagagggtacttgaacctctgggcctggttgaggaacctgttaagacggctccgggaaaaaagaggccggtagagcactctcctgtggagccagactcctcctcgggaaccggaaaggcgggccagcagcctgcaagaaaaagattgaattttggtcagactggagacgcagactcagtacctgacccccagcctctcggacagccaccagcagccccctctggtctgggaactaatacgatggctacaggcagtggcgcaccaatggcagacaataacgagggcgccgacggagtgggtaattcctcgggaaattggcattgcgattccacatggatgggcgacagagtcatcaccaccagcacccgaacctgggccctgcccacctacaacaaccacctctacaaacaaatttccagccaatcaggagcctcgaacgacaatcactactttggctacagcaccccttgggggtattttgacttcaacagattccactgccacttttcaccacgtgactggcaaagactcatcaacaacaactggggattccgacccaagagactcaacttcaagctctttaacattcaagtcaaagaggtcacgcagaatgacggtacgacgacgattgccaataaccttaccggcacggttcaggtgtttactgactcggagtaccagctcccgtacgtcctcggctcggcgcatcaaggatgcctcccgccgttcccagcagacgtcttcatggtgccacagtatggatacctcaccctgaacaacgggagtcaggcagtaggacgctcttcattttactgcctggagtactttccttctcagatgctgcgtaccggaaacaactttaccttcagctacacttttgaggacgttcctttccacagcagctacgctcacagccagagtctgggccgtctcatgaatcctctcatcgaccagtacctgtattacttgagcagaacaaacactccaagtggaaccaccacgcagtcaaggcttcagttttctcaggccggagcgagtgacattcgggaccagtctaggaactggcttcctggaccctgttaccgccagcagcgagtatcaaagacatctgcggataacaacaacagtgaatactcgtggactggagctaccaagtaccacctcaatggcagagactctctggtgaatccgggcccggccatggcaagccacaaggacgatgaagaaaagttttttcctcagagcggggttctcatctttgggaagcaaggctcagagaaaacaaatgtggacattgaaaaggtcatgattacagacgaagaggaaatcaggacaaccaatcccgtggctacggagcagtatggttctgtatctaccaacctccagagaggcaacagacaagcagctaccgcagatgtcaacacacaaggcgttcttccaggcatggtctggcaggacagagatgtgtaccttcaggggcccatctgggcaaagattccacacacggacggacattttcacccctctcccctcatgggtggattcggacttaaacaccctcctccacagattctcatcaagaacaccccggtacctgcgaatccttcgaccaccttcagtgcggcaaagtttgcttccttcatcacacagtactccacgggacaggtcagcgtggagatcgagtgggagctgcagaaggaaaacagcaaacgctggaatcccgaaattcagtacacttccaactacaacaagtctgttaatgtggactttactgtggacactaatggcgtgtattcagagcctcgccccattggcaccagatacctgactcgtaatctgtaa

SEQ ID NO: 2629 - protein, 735 aa, Artificial Sequence
  Synthetic polypeptide
MAADGYLPDWLEDTLSEGIRQRWKLKPGPPPPEPAERHKDDSRGLVLPGYKYLGPFNGLDKGEPVNEADAAALEHDKAYDRQLDSGDNPYLKYNHADAEFQERLKEDTSFGGNLGRAVFQAKKRVLEPLGLVEEPVKTAPGKKRPVEHSPVEPDSSSGTGKAGQQPARKRLNFGQTGDADSVPDPQPLGQPPAAPSGLGTNTMATGSGAPMADNNEGADGVGNSSGNWHCDSTWMGDRVITTSTRTWALPTYNNHLYKQISSQSGASNDNHYFGYSTPWGYFDFNRFHCHFSPRDWQRLINNNWGFRPKRLNFKLFNIQVKEVTQNDGTTTIANNLTGTVQVFTDSEYQLPYVLGSAHQGCLPPFPADVFMVPQYGYLTLNNGSQAVGRSSFYCLEYFPSQMLRTGNNFTFSYTFEDVPFHSSYAHSQSLGRLMNPLIDQYLYYLSRTNTPSGTTTQSRLQFSQAGASDIRDQSRNWLPGPCYRQQRVSKTSADNNNSEYSWTGATKYHLNGRDSLVNPGPAMASHKDDEEKFFPQSGVLIFGKQGSEKTNVDIEKVMITDEEEIRTTNPVATEQYGSVSTNLQRGNRQAATADVNTQGVLPGMVWQDRDVYLQGPIWAKIPHTDGHFHPSPLMGGFGLKHPPPQILIKNTPVPANPSTTFSAAKFASFITQYSTGQVSVEIEWELQKENSKRWNPEIQYTSNYNKSVNVDFTVDTNGVYSEPRPIGTRYLTRNL

SEQ ID NO: 2630 - DNA, 2208 bp, Artificial Sequence
  Synthetic polynucleotide
atggctgccgatggttatcttccagattggctcgaggacactctctctgaaggaataagacagcggtggaagctcaaacctggcccaccaccaccagagcccgcagagcggcataaggacgacagcaggggtcttgtgcttcctgggtacaagtacctcggacccttcaacggactcgacaagggagagccggtcaacgaggcagacgccgcggccctcgagcacgacaaagcctacgaccggcagctcgacagcggagacaacccgtacctcaagtacaaccacgccgacgcggagtttcaggagcgccttaaagaagatacgtcctttgggggcaacctcggacgagcagtcttccaggcgaaaaagagggtacttgaacctctgggcctggttgaggaacctgttaagacggctccgggaaaaaagaggccggtagagcactctcctgtggagccagactcctcctcgggaaccggaaaggcgggccagcagcctgcaagaaaaagattgaattttggtcagactggagacgcagactcagtacctgacccccagcctctcggacagccaccagcagccccctctggtctgggaactaatacgatggctacaggcagtggcgcaccaatggcagacaataacgagggcgccgacggagtgggtaattcctcgggaaattggcattgcgattccacatggatgggcgacagagtcatcaccaccagcacccgaacctgggccctgcccacctacaacaaccacctctacaaacaaatttccagccaatcaggagcctcgaacgacaatcactactttggctacagcaccccttgggggtattttgacttcaacagattccactgccacttttcaccacgtgactggcaaagactcatcaacaacaactggggattccgacccaagagactcaacttcaagctctttaacattcaagtcaaagaggtcacgcagaatgacggtacgacgacgattgccaataaccttaccagcacggttcaggtgtttactgactcggagtaccagctcccgtacgtcctcggctcggcgcatcaaggatgcctcccgccgttcccagcagacgtcttcatggtgccacagtatggatacctcaccctgaacaacgagagtcaggcagtaggacgctcttcattttactgcctggagtactttccttctcagatgctgcgtaccggaaacaactttaccttcagctacacttttgaggacgttcctttccacagcagctacgctcacagccagagtctgggccgtctcatgaatcctctcatcgaccagtacctgtattacttgagcagaacaaacactccaagtggaaccaccacgcagtcaaggcttcagttttctcaggccggagcgagtgacattcgggaccagtctaggaactggcttcctggaccctgttaccgccagcagcgagtatcaaagacatctgcggataacaacaacagtgaatactcgtggactggagctaccaagtaccacctcaatggcagagactctctggtgaatccgggcccggccatggcaagccacaaggacgatgaagaaaagttttttcctcagagcggggttctcatctttgggaagcaaggctcagagaaaacaaatgtggacattgaaaaggtcatgattacagacgaagaggaaatcaggacaaccaatcccgtggctacggagcagtatggttctgtatctaccaacctccagagaggcaacagacaagcagctaccgcagatgtcaacacacaaggcgttcttccaggcatggtctggcaggacagagatgtgtaccttcaggggcccatctgggcaaagattccacacacggacggacattttcacccctctcccctcatgggtggattcggacttaaacaccctcctccacagattctcatcaagaacaccccggtacctgcgaatccttcgaccaccttcagtgcggcaaagtttgcttccttcatcacacagtactccacgggacaggtcagcgtggagatcgagtgggagctgcagaaggaaaacagcaaacgctggaatcccgaaattcagtacacttccaactacaacaagtctgttaatgtggactttactgtggacactaatggcgtgtattcagagcctcgccccattggcaccagatacctgactcgtaatctgtaa

SEQ ID NO: 2631 - protein, 735 aa, Artificial Sequence
  Synthetic polypeptide
MAADGYLPDWLEDTLSEGIRQRWKLKPGPPPPEPAERHKDDSRGLVLPGYKYLGPFNGLDKGEPVNEADAAALEHDKAYDRQLDSGDNPYLKYNHADAEFQERLKEDTSFGGNLGRAVFQAKKRVLEPLGLVEEPVKTAPGKKRPVEHSPVEPDSSSGTGKAGQQPARKRLNFGQTGDADSVPDPQPLGQPPAAPSGLGTNTMATGSGAPMADNNEGADGVGNSSGNWHCDSTWMGDRVITTSTRTWALPTYNNHLYKQISSQSGASNDNHYFGYSTPWGYFDFNRFHCHFSPRDWQRLINNNWGFRPKRLNFKLFNIQVKEVTQNDGTTTIANNLTSTVQVFTDSEYQLPYVLGSAHQGCLPPFPADVFMVPQYGYLTLNNESQAVGRSSFYCLEYFPSQMLRTGNNFTFSYTFEDVPFHSSYAHSQSLGRLMNPLIDQYLYYLSRTNTPSGTTTQSRLQFSQAGASDIRDQSRNWLPGPCYRQQRVSKTSADNNNSEYSWTGATKYHLNGRDSLVNPGPAMASHKDDEEKFFPQSGVLIFGKQGSEKTNVDIEKVMITDEEEIRTTNPVATEQYGSVSTNLQRGNRQAATADVNTQGVLPGMVWQDRDVYLQGPIWAKIPHTDGHFHPSPLMGGFGLKHPPPQILIKNTPVPANPSTTFSAAKFASFITQYSTGQVSVEIEWELQKENSKRWNPEIQYTSNYNKSVNVDFTVDTNGVYSEPRPIGTRYLTRNL

SEQ ID NO: 2632 - DNA, 2208 bp, Artificial Sequence
  Synthetic polynucleotide
atggctgccgatggttatcttccagattggctcgaggacactctctctgaaggaataagacagcggtggaagctcaaacctggcccaccaccaccagagcccgcagagcggcataaggacgacagcaggggtcttgtgcttcctgggtacaagtacctcggacccttcaacggactcgacaagggagagccggtcaacgaggcagacgccgcggccctcgagcacgacaaagcctacgaccggcagctcgacagcggagacaacccgtacctcaagtacaaccacgccgacgcggagtttcaggagcgccttaaagaagatacgtcttttgggggcaacctcggacgagcagtcttccaggcgaaaaagagggtacttgaacctctgggcctggttgaggaacctgttaagacggctccgggaaaaaagaggccggtagagcactctcctgtggagccagactcctcctcgggaaccggaaaggcgggccagcagcctgcaagaaaaagattgaattttggtcagactggagacgcagactcagtacctgacccccagcctctcggacagccaccagcagccccctctggtctgggaactaatacgatggctacaggcagtggcgcaccaatggcagacaataacgagggcgccgacggagtgggtaattcctcgggaaattggcattgcgattccacatggatgggcgacagagtcatcaccaccagcacccgaacctgggccctgcccacctacaacaaccacctctacaaacaaatttccagccaatcaggagcctcgaacgacaatcactactttggctacagcaccccttgggggtattttgacttcaacagattccactgccacttttcaccacgtgactggcaaagactcatcaacaacaactggggattccgacccaagagactcaacttcaagctctttaacattcaagtcaaagaggtcacgcagaatgacggtacgacgacgattgccaataaccttaccagcacggttcaggtgtttactgactcggagtaccagctcccgtacgtcctcggctcggcgcatcaaggatgcctcccgccgttcccagcagacgtcttcatggtaccacagtatggatacctcaccctgaacaacgggagtcaggcagtaggacgctcttcattttactgcctggagtactttccttctcagatgctgcgtaccggaaacaactttaccttcagctacacttttgaggacgttcctttccacagcagctacgctcacagccagagtctgggccgtctcatgaatcctctcatcgaccagtacctgtattacttgagcagaacaaacactccaagtggaaccaccacgcagtcaaggcttcagttttctcaggccggagcgagtgacattcgggaccagtctaggaactggcttcctggaccctgttaccgccagcagcgagtatcaaagacatctgcggataacaacaacagtgaatactcgtggactggagctaccaagtaccacctcaatggcagagactctctggtgaatccgggcccggccatggcaagccacaaggacgatgaagaaaagttttttcctcagagcggggttctcatctttgggaagcaaggctcagagaaaacaaatgtggacattgaaaaggtcatgattacagacgaagaggaaatcaggacaaccaatcccgtggctacggagcagtatggttctgtatctaccaacctccagagaggcaacagacaagcagctaccgcagatgtcaacacacaaggcgttcttccaggcatggtctggcaggacagagatgtgtaccttcaggggcccatctgggcaaagattccacacacggacggacattttcacccctctcccctcatgggtggattcggacttaaacaccctcctccacagattctcatcaagaacaccccggtacctgcgaatccttcgaccaccttcagtgcggcaaagtttgcttccttcatcacacagtactccacgggacaggtcagcgtggagatcgagtgggagctgcagaaggaaaacagcaaacgctggaatcccgaaattcagtacacttccaactacaacaagtctgttaatgtggactttactgtggacactaatggcgtgtattcagagcctcgccccattggcaccagatacctgactcgtaatctgtaa

SEQ ID NO: 2633 - protein, 735 aa, Artificial Sequence
  Synthetic polypeptide
MAADGYLPDWLEDTLSEGIRQRWKLKPGPPPPEPAERHKDDSRGLVLPGYKYLGPFNGLDKGEPVNEADAAALEHDKAYDRQLDSGDNPYLKYNHADAEFQERLKEDTSFGGNLGRAVFQAKKRVLEPLGLVEEPVKTAPGKKRPVEHSPVEPDSSSGTGKAGQQPARKRLNFGQTGDADSVPDPQPLGQPPAAPSGLGTNTMATGSGAPMADNNEGADGVGNSSGNWHCDSTWMGDRVITTSTRTWALPTYNNHLYKQISSQSGASNDNHYFGYSTPWGYFDFNRFHCHFSPRDWQRLINNNWGFRPKRLNFKLFNIQVKEVTQNDGTTTIANNLTSTVQVFTDSEYQLPYVLGSAHQGCLPPFPADVFMVPQYGYLTLNNGSQAVGRSSFYCLEYFPSQMLRTGNNFTFSYTFEDVPFHSSYAHSQSLGRLMNPLIDQYLYYLSRTNTPSGTTTQSRLQFSQAGASDIRDQSRNWLPGPCYRQQRVSKTSADNNNSEYSWTGATKYHLNGRDSLVNPGPAMASHKDDEEKFFPQSGVLIFGKQGSEKTNVDIEKVMITDEEEIRTTNPVATEQYGSVSTNLQRGNRQAATADVNTQGVLPGMVWQDRDVYLQGPIWAKIPHTDGHFHPSPLMGGFGLKHPPPQILIKNTPVPANPSTTFSAAKFASFITQYSTGQVSVEIEWELQKENSKRWNPEIQYTSNYNKSVNVDFTVDTNGVYSEPRPIGTRYLTRNL

SEQ ID NO: 2634 - DNA, 2208 bp, Artificial Sequence
  Synthetic polynucleotide
atggctgccgatggttatcttccagattggctcgaggacactctctctgaaggaataagacagcggtggaagctcaaacctggcccaccaccaccagagcccgcagagcggcataaggacgacagcaggggtcttgtgcttcctgggtacaagtacctcggacccttcaacggactcgacaagggagagccggtcaacgaggcagacgccgcggccctcgagcacgacaaagcctacgaccggcagctcgacagcggagacaacccgtacctcaagtacaaccacgccgacgcggagtttcaggagcgccttaaagaagatacgtcttttgggggcaacctcggacgagcagtcttccaggcgaaaaagagggtactcgaacctctgggcctggttgaggaacctgttaagacggctccgggaaaaaagaggccggtagagcactctcctgtggagccagactcctcctcgggaaccggaaaggcgggccagcagcctgcaagaaaaagattgaattttggtcagactggagacgcagactcagtacctgacccccagcctctcggacagccaccagcagccccctctggtctgggaactaatacgatggctacaggcagtggcgcaccaatggcagacaataacgagggcgccgacggagtgggtaattcctcgggaaattggcattgcgattccacatggatgggcgacagagtcatcaccaccagcacccgaacctgggccctgcccacctacaacaaccacctctacaaacaaatttccagccaatcaggagcctcgaacgacaatcactactttggctacagcaccccttgggggtattttgacttcaacagattccactgccacttttcaccacgtgactggcaaagactcatcaacaacaactggggattccgacccaagagactcaacttcaagctctttaacattcaagtcaaagaggtcacgcagaatgacggtacgacgacgattgccaataaccttaccagcacggttcaggtgtttactgactcggagtaccagctcccgtacgtcctcggctcggcgcatcaaggatgcctcccgccgttcccagcagacgtcttcatggtgccacagtatggatacctcaccctgaacaacgggagtcaggcagcaggacgctcttcattttactgcctggagtactttccttctcagatgctgcgtaccggaaacaactttaccttcagctacacttttgaggacgttcctttccacagcagctacgctcacagccagagtctgggccgtctcatgaatcctctcatcgaccagtacctgtattacttgagcagaacaaacactccaagtggaaccaccacgcagtcaaggcttcagttttctcaggccggagcgagtgacattcgggaccagtctaggaactggcttcctggaccctgttaccgccagcagcgagtatcaaagacatctgcggataacaacaacagtgaatactcgtggactggagctaccaagtaccacctcaatggcagagactctctggtgaatccgggcccggccatggcaagccacaaggacgatgaagaaaagttttttcctcagagcggggttctcatctttgggaagcaaggctcagagaaaacaaatgtggacattgaaaaggtcatgattacagacgaagaggaaatcaggacaaccaatcccgtggctacggagcagtatggttctgtatctaccaacctccagagaggcaacagacaagcagctaccgcagatgtcaacacacaaggcgttcttccaggcatggtctggcaggacagagatgtgtaccttcaggggcccatctgggcaaagattccacacacggacggacattttcacccctctcccctcatgggtggattcggacttaaacaccctcctccacagattctcatcaagaacaccccggtacctgcgaatccttcgaccaccttcagtgcggcaaagtttgcttccttcatcacacagtactccacgggacaggtcagcgtggagatcgagtgggagctgcagaaggaaaacagcaaacgctggaatcccgaaattcagtacacttccaactacaacaagtccgttaatgtggactttactgtggacactaatggcgtgtattcagagcctcgccccattggcaccagatacctgactcgtaatctgtaa

SEQ ID NO: 2635 - protein, 735 aa, Artificial Sequence
  Synthetic polypeptide
MAADGYLPDWLEDTLSEGIRQRWKLKPGPPPPEPAERHKDDSRGLVLPGYKYLGPFNGLDKGEPVNEADAAALEHDKAYDRQLDSGDNPYLKYNHADAEFQERLKEDTSFGGNLGRAVFQAKKRVLEPLGLVEEPVKTAPGKKRPVEHSPVEPDSSSGTGKAGQQPARKRLNFGQTGDADSVPDPQPLGQPPAAPSGLGTNTMATGSGAPMADNNEGADGVGNSSGNWHCDSTWMGDRVITTSTRTWALPTYNNHLYKQISSQSGASNDNHYFGYSTPWGYFDFNRFHCHFSPRDWQRLINNNWGFRPKRLNFKLFNIQVKEVTQNDGTTTIANNLTSTVQVFTDSEYQLPYVLGSAHQGCLPPFPADVFMVPQYGYLTLNNGSQAAGRSSFYCLEYFPSQMLRTGNNFTFSYTFEDVPFHSSYAHSQSLGRLMNPLIDQYLYYLSRTNTPSGTTTQSRLQFSQAGASDIRDQSRNWLPGPCYRQQRVSKTSADNNNSEYSWTGATKYHLNGRDSLVNPGPAMASHKDDEEKFFPQSGVLIFGKQGSEKTNVDIEKVMITDEEEIRTTNPVATEQYGSVSTNLQRGNRQAATADVNTQGVLPGMVWQDRDVYLQGPIWAKIPHTDGHFHPSPLMGGFGLKHPPPQILIKNTPVPANPSTTFSAAKFASFITQYSTGQVSVEIEWELQKENSKRWNPEIQYTSNYNKSVNVDFTVDTNGVYSEPRPIGTRYLTRNL

SEQ ID NO: 2636 - protein, 738 aa, Artificial Sequence; identical to SEQ ID NO: 2478
  Synthetic polypeptide

SEQ ID NO: 2637 - DNA, 2217 bp, Artificial Sequence
  Synthetic polynucleotide
atggctgctgacggttatcttccagattggctcgaggacaacctctctgagggcattcgcgagtggtgggacctgaaacctggagcccccaagcccaaggccaaccagcagaagcaggacgacggccggggtctggtgcttcctggctacaagtacctcggacccttcaacggactcgacaagggggagcccgtcaacgcggcggacgcagcggccctcgagcacgacaaggcctacgaccagcagctcaaagcgggtgacaatccgtacctgcggtataaccacgccgacgccgagtttcaggagcgtctgcaagaagatacgtcttttgggggcaacctcgggcgagcagtcttccaggccaagaagcgggttctcgaacctctcggtctggttgaggaagctgctaagacggctcctggaaagaagagaccggtagaaccgtcacctcagcgttcccccgactcctccacgggcatcggcaagaaaggccagcagcccgctaaaaagagactgaactttggtcagactggcgactcagagtcagtccccgaccctcaaccaatcggagaaccaccagcaggcccctctggtctgggatctggtacaatggctgcaggcggtggcgctccaatggcagacaataacgaaggcgccgacggagtgggtagttcctcaggaaattggcattgcgattccacatggctgggcgacagagtcatcaccaccagcacccgaacctgggccctgcccacctacaacaaccacctctacaagcaaatatccaatgggacatcgggaggaagcaccaacgacaacacctacttcggctacagcaccccctgggggtattttgacttcaacagattccactgccacttctcaccacgtgactggcagcgactcatcaacaacaactggggattccggccaaaaagactcagcttcaagctcttcaacatccaggtcaaggaggtcacgcagaatgaaggcaccaagaccatcgccaataaccttaccagcacgattcaggtatttacggactcggaataccagctgccgtacgtcctcggctccgcgcaccagggctgcctgcctccgttcccggcggacgtcttcatgattccccagtacggctaccttacactgaacaatggaagtcaagccgtaggccgttcctccttctactgcctggaatattttccatctcaaatgctgcgaactggaaacaattttgaattcagctacaccttcgaggacgtgcctttccacagcagctacgcacacagccagagcttggaccgactgatgaatcctctcatcgaccagtacctgtactacttatccagaactcagtccacaggaggaactcaaggtacccagcaattgttattttctcaagctgggcctgcaaacatgtcggctcaggctaagaactggctacctggaccttgctaccggcagcagcgagtctctacgacactgtcgcaaaacaacaacagcaactttgcttggactggtgccaccaaatatcacctgaacggaagagactctttggtaaatcccggtgtcgccatggcaacccacaaggacgacgaggaacgcttcttcccgtcgagtggagtcctgatgttcggaaaacagggtgctggaagagacaatgtggactacagcagcgttatgctaaccagcgaagaagaaattaaaaccactaaccccgtagccacagaacaatacggtgtggtggctgacaacttgcagcaaaccaatacagggcctattgtgggaaatgtcaacagccaaggagccttacctggcatggtctggcagaaccgagacgtgtacctgcagggtcccatctgggccaagattcctcacacggacggcaacttccacccttcaccgctaatgggaggatttggactgaagcacccacctcctcagatcctgatcaagaacacgccggtacctgcggatcctccaacaacgttcagccaggcgaaattggcttccttcattacgcagtacagcaccggacaggtcagcgtggaaatcgagtgggagctgcagaaggagaacagcaaacgctggaacccagagattcagtacacttcaaactactacaaatctacaaatgtggactttgctgtcaatacagagggaacttattctgagcctcgccccattggtactcgttacctcacccgtaatctgtaa

SEQ ID NO: 2638 - protein, 738 aa, Artificial Sequence
  Synthetic polypeptide
MAADGYLPDWLEDNLSEGIREWWDLKPGAPKPKANQQKQDDGRGLVLPGYKYLGPFNGLDKGEPVNAADAAALEHDKAYDQQLKAGDNPYLRYNHADAEFQERLQEDTSFGGNLGRAVFQAKKRVLEPLGLVEEAAKTAPGKKRPVEPSPQRSPDSSTGIGKKGQQPAKKRLNFGQTGDSESVPDPQPIGEPPAGPSGLGSGTMAAGGGAPMADNNEGADGVGSSSGNWHCDSTWLGDRVITTSTRTWALPTYNNHLYKQISNGTSGGSTNDNTYFGYSTPWGYFDFNRFHCHFSPRDWQRLINNNWGFRPKRLSFKLFNIQVKEVTQNEGTKTIANNLTSTIQVFTDSEYQLPYVLGSAHQGCLPPFPADVFMIPQYGYLTLNNGSQAVGRSSFYCLEYFPSQMLRTGNNFEFSYTFEDVPFHSSYAHSQSLDRLMNPLIDQYLYYLSRTQSTGGTQGTQQLLFSQAGPANMSAQAKNWLPGPCYRQQRVSTTLSQNNNSNFAWTGATKYHLNGRDSLVNPGVAMATHKDDEERFFPSSGVLMFGKQGAGRDNVDYSSVMLTSEEEIKTTNPVATEQYGVVADNLQQTNTGPIVGNVNSQGALPGMVWQNRDVYLQGPIWAKIPHTDGNCHPSPLMGGFGLKHPPPQILIKNTPVPADPPTTFSQAKLASFITQYSTGQVSVEIEWELQKENSKRWNPEIQYTSNYYKSTNVDFAVNTEGTYSEPRPIGTRYLTRNL

SEQ ID NO: 2639 - protein, 738 aa, Artificial Sequence
  Synthetic polypeptide
MAADGYLPDWLEDNLSEGIREWWDLKPGAPKPKANQQKQDDGRGLVLPGYKYLGPFNGLDKGEPVNAADAAALEHDKAYDQQLKAGDNPYLRYNHADAEFQERLQEDTSFGGNLGRAVFQAKKRVLEPLGLVEEGAKTAPGKKRPVEPSPQRSPDSSTGIGKKGQQPARKRLNFGRTGDSESVPDPQPIGEPPAAPSSVGSGTMAAGGGAPMADNNEGADGVGSSSGNWHCDSTWLGDRVITTSTRTWALPTYNNHLYKQISNGTSGGSTNDNTYFGYSTPWGYLDFNRFHCHFSPRDWQRLINNNWGFRPKRLSFKLFNIQVKEVTQNEGTKTIANNLASTIQVFTDSEYQPPYVLGSAHQGCLPPFPADVFMIPQYGYLTLNNGSQAVGRSSFYCLEYFPSQMLRTGNNFSFSYTFEDVPFHSSYAHSQSLDRLMNPLIDQYLYYLSRTQSTGGTAGTQQLLFSRAGPSNMSAQARNWLPGPCYRQQRVSTTLSQNNNSNFAWTGATKYHLNGRDSLVNPGVAMATNKDDEDRFFPSSGILMFGKQGAGKDNVDYSNVMLTSEEEIKTTNPVATEQYGVVADNLQQQNTAPTVGAVNSQGALPGMVWQNRDVYLQGPIWAKIPHTDGNFHPSPLMGGFGLKHPPPQILIKNTPVPADPPTAFNQAKLNSFIAQYSTGQVSVEIEWELQKENSKRWNPEIQYTSNYYKSTNADFAVNTEGVYSEPRPIGTRYLTRNL

SEQ ID NO: 2640 - DNA, 2217 bp, Artificial Sequence
  Synthetic polynucleotide
atggctgccgatggttatcttccagattggctcgaggacaacctctctgagggcattcgcgagtggtgggacctgaaacctggagccccgaaacccaaagccaaccagcaaaagcaggacgacggccggggtctggtgcttcctggctacaagtacctcggacccttcaacggactcgacaagggggagcccgtcaacgcggcggacgcagcggccctcgagcacgacaaggcctacgaccagcagctcaaagcgggtgacaatccgtacctgcggtataatcacgccgacgccgagtttcaggagcgtctgcaagaagatacgtcttttgggggcaacctcgggcgagcagtcttccaggccaagaagcgggttctcgaacctctcggtctggttgaggaaggcgctaagacggctcctggaaagaagagaccggtagagccgtcaccacagcgttcccccgactcctccacgggcatcggcaagaaaggccagcagcccgccagaaagagactcaatttcggtcggactggcgactcagagtcagtccccgaccctcaacctatcggagaacctccagcagcgccctctagtgtgggatctggtacaatggctgcaggcggtggcgcaccaatggcagacaataacgaaggtgccgacggagtgggtagttcctcgggaaattggcattgcgattccacatggctgggcgacagagttatcaccaccagcacccgaacctgggccctgcccacctacaacaaccacctctacaagcaaatctccaacgggacctcgggaggcagcaccaacgacaacacctactttggctacagcaccccctgggggtatcttgactttaacagattccactgccacttctcaccacgtgactggcagcgactcatcaacaacaactggggattccggcccaagagactcagcttcaagctcttcaacatccaggtcaaagaggtcacgcagaatgaaggcaccaagaccatcgccaataacctcgccagcaccatccaggtgtttacggactcggaataccagccgccgtacgtcctcggctctgcccaccagggctgcctgcctccgttcccggcggacgtcttcatgattcctcagtacggctacctgactctcaacaacggtagtcaggccgtgggacgttcctccttctactgcctggagtacttcccctctcagatgctgagaacgggcaacaacttttccttcagctacactttcgaggacgtgcctttccacagcagctacgcgcacagccagagtttggacaggctgatgaatcctctcatcgaccagtacctgtactacctgtcaagaacccagtctacgggaggcacagcgggaacccagcagttgctgttttctcgggccgggcctagcaacatgtcggctcaggccagaaactggctgcctggaccctgctacagacagcagcgcgtctccacgacactgtcgcaaaacaacaacagcaactttgcctggactggtgccaccaagtatcatctgaacggcagagactctctggtgaatccgggcgtcgccatggcaaccaacaaggacgacgaggaccgcttcttcccatccagcggcatcctcatgtttggcaagcagggagctggaaaagacaacgtggactatagcaacgtgatgctaaccagcgaggaagaaatcaagaccaccaaccccgtggccacagaacagtatggcgtggtggctgataacctacagcagcaaaacaccgctcctactgtgggggccgtcaacagccagggagccttacctggcatggtctggcagaaccgggacgtgtacctgcagggtcctatttgggccaagattcctcacacagatggcaactttcacccgtctcctttaatgggcggctttggacttaaacatccgcctcctcagatcctcatcaaaaacactcctgttcctgcggatcctccaacagcgttcaaccaggccaagctgaattctttcatcgcgcagtacagcaccggacaagtcagcgtggagatcgagtgggagctgcagaaggagaacagcaagcgctggaacccagagattcagtatacttccaactactacaaatctacaaatgcggactttgctgttaatactgagggtgtttactctgagcctcgccccattggcactcgttacctcacccgtaatctgtaa

SEQ ID NO: 2641 - DNA, 2208 bp, Artificial Sequence
  Synthetic polynucleotide
atggctgccgatggttatcttccagattggctcgaggacactctctctgaaggaataagacagtggtggaagctcaaacctggcccaccaccaccaaagcccgcagagcggcataaggacgacagcaggggtcttgtgcttcctgggtacaagtacctcggacccttcaacggactcgacaagggggagccggtcaacgaggcagacgccgcggccctcgagcacgacaaggcctacgaccggcagctcgacagcggagacaacccgtacctcaagtacaaccacgccgacgcagagtttcaggagcgccttaaagaagatacgtcttttgggggcaacctcggacgagcagtcttccaggcgaaaaagagggttcttgaacctctgggcctggttgaggagcctgttaagacggctccgggaaaaaagaggccggtagagcactctcctgtggagccagactcctcctcgggaaccggaaaagcgggccagcagcctgcaagaaaaagattaaattttggtcagactggagacgcagactccgtacctgacccccagcctctcggacagccaccagcagccccctctggtctgggatctactacaatggctacaggcagtggcgcaccaatggcagacaataacgagggtgccgatggagtgggtaattcctcaggaaattggcattgcgattcccaatggctgggcgacagagtcatcaccaccagcacccgaacctgggccctgcccacatacaacaaccacctctacaagcaaatctccagccaatcaggagccagcaacgacaaccactactttggctacagcaccccctgggggtattttgacttcaacagattccactgccacttttcaccacgtgactggcaaagactcgtcaacaacaaccggggattccggcccaaaagactcaacttcaagctctttaatattcaagtcaaagaggtcacgcagaatgacggtacgacgacgattgccaataaccttaccagcacggttcaggtgtttactgactcggagtaccagctcccgtacgtcctgggctcggcgcatcaaggatgcctcccgccgtttccagcggacgtcttcatggtcccacagtatggatacctcaccctgaacaacgggagtcaggcggtaggacgctcttccttttactgcctggagtactttccttctcagatgctgcgtactggaaacaactttcagttcagctacacttttgaagacgtgcctttccacagcagctacgctcacagccagagtctggatcggctgatgaatcctctgatcgaccagtacctgtattatctgaacaagacacaaacaaatagtggaactcttcagcagtctcggctactgtttagccaagctggaccaaccaacatgtctcttcaagctaaaaactggctgcctggaccttgctacagacagcagcgtctgtcaaaacaggcaaacgacaacaacaacagcaactttccctggactgcagctacaaagtatcatctaaatggccgggactcgttggttaatccaggaccagctatggccagtcacaaggatgacgaagaaaagtttttccccatgcatggaaccctgatatttggtaaacaaggaacaaatgccaacgacgcggatttggaaaatgtcatgattacagatgaagaagaaatcagggccaccaatcccgtggctacggagcagtacgggactgtgtcaaataatttgcaaaactcaaacactggtccaactactggaactgtcaatcaccaaggagcgttacctggtatggtgtggcaggatcgagacgtgtacctgcagggacccatttgggccaagattcctcacaccgatggacactttcatccttctccactgatgggaggttttggactcaaacacccgcctcctcagatcatgatcaaaaacactcccgttccagccaatcctcccacaaacttcagttctgccaagtttgcttctttcatcacacagtattccacgggacaggtcagcgtggagatcgagtgggagctgcagaaggagaacagcaaacgctggaatcccgaaattcagtacacttccaactacaacaagtctgttaatgtggactttactgtggacactaatggtgtgtattcagagcctcgccccattggcaccagatacctgactcgtaatctgtaa

SEQ ID NO: 2642 - protein, 735 aa, Artificial Sequence
  Synthetic polypeptide
MAADGYLPDWLEDTLSEGIRQWWKLKPGPPPPKPAERHKDDSRGLVLPGYKYLGPFNGLDKGEPVNEADAAALEHDKAYDRQLDSGDNPYLKYNHADAEFQERLKEDTSFGGNLGRAVFQAKKRVLEPLGLVEEPVKTAPGKKRPVEHSPVEPDSSSGTGKAGQQPARKRLNFGQTGDADSVPDPQPLGQPPAAPSGLGSTTMATGSGAPMADNNEGADGVGNSSGNWHCDSQWLGDRVITTSTRTWALPTYNNHLYKQISSQSGASNDNHYFGYSTPWGYFDFNRFHCHFSPRDWQRLVNNNRGFRPKRLNFKLFNIQVKEVTQNDGTTTIANNLTSTVQVFTDSEYQLPYVLGSAHQGCLPPFPADVFMVPQYGYLTLNNGSQAVGRSSFYCLEYFPSQMLRTGNNFQFSYTFEDVPFHSSYAHSQSLDRLMNPLIDQYLYYLNKTQTNSGTLQQSRLLFSQAGPTNMSLQAKNWLPGPCYRQQRLSKQANDNNNSNFPWTAATKYHLNGRDSLVNPGPAMASHKDDEEKFFPMHGTLIFGKQGTNANDADLENVMITDEEEIRATNPVATEQYGTVSNNLQNSNTGPTTGTVNHQGALPGMVWQDRDVYLQGPIWAKIPHTDGHFHPSPLMGGFGLKHPPPQIMIKNTPVPANPPTNFSSAKFASFITQYSTGQVSVEIEWELQKENSKRWNPEIQYTSNYNKSVNVDFTVDTNGVYSEPRPIGTRYLTRNL

SEQ ID NO: 2643 - protein, 738 aa, Artificial Sequence
  Synthetic polypeptide
MAADGYLPDWLEDNLSEGIREWWDLKPGAPKPKANQQKQDDGRGLVLPGYKYLGPFNGLDKGEPVNAADAAALEHDKAYDQQLKAGDNPYLRYNHADAEFQERLQEDTSFGGNLGRAVFQAKKRVLEPLGLVEEAAKTAPGKKRPVEPSPQRSPDSSTGIGKKGQQPAKKRLSFGQTGDSESVPDPQPIGEPPAGPSGLGSGTMAAGGGAPMADNNEGADGVGSSSGNWHCDSTWLGDRVITTSTRTWALPTYNNHLYKQISNGTSGGSTNDNTYFGYSTPWGYFDFNRFHCHFSPRDWQRLINNNWGFRPKRLSFKLFNIQVKEVTQNEGTKTIANNLTSTIQVFTDSEYQLPYVLGSAHQGCLPPFPADVFMIPQYGYLTLNNGSQAVGRSSFYCLEYFPSQMLRTGNNSEFSYTFEDVPFHSSYAHSQSLDRLMNPLIDQYLYYLSRTQSTGGTQGTQQLLFSQAGPANMSAQAKNWLPGPCYRQQRVSTTLSQNNNSNFAWTGATKYHLNGRDSLVNPGVAMATHKDDEERFFPSSGVLMFGKQGAGRDNVDYSSVMLTSEEEIKTTNPVATEQYGVVADNLQQTNTGPIVGNVNSQGALPGMVWQNRDVYLQGPIWAKIPHTDGNFHPSPLMGGFGLKHPPPQILIKNTPVPADPPTTFSQAKLASFITQYSTGQVSVEIEWELQKENSKRWNPEIQYTSNYYKSTNVDFAVNTEGTYSEPRPIGTRYLTRNL

SEQ ID NO: 2644 - DNA, 2217 bp, Artificial Sequence
  Synthetic polynucleotide
atggctgctgacggttatcttccagattggctcgaggacaacctctctgagggcattcgcgagtggtgggacctgaaacctggagcccccaagcccaaggccaaccagcagaagcaggacgacggccggggtctggtgcttcctggctacaagtacctcggacccttcaacggactcgacaagggggagcccgtcaacgcggcggacgcagcggccctcgagcacgacaaggcctacgaccagcagctcaaagcgggtgacaatccgtacctgcggtataaccacgccgacgccgagtttcaggagcgtctgcaagaagatacgtcttttgggggcaacctcgggcgagcagtcttccaggccaagaagcgggttctcgaacctctcggtctggttgaggaagctgctaagacggctcctggaaagaagagaccggtagaaccgtcacctcagcgttcccccgactcctccacgggcatcggcaagaaaggccagcagcccgctaaaaagagactgagctttggtcagactggcgactcagagtcagtccccgaccctcaaccaatcggagaaccaccagcaggcccctctggtctgggatctggtacaatggctgcaggcggtggcgctccaatggcagacaataacgaaggcgccgacggagtgggtagttcctcaggaaattggcattgcgattccacatggctgggcgacagagtcatcaccaccagcacccgaacctgggccctgcccacctacaacaaccacctctacaagcaaatatccaatgggacatcgggaggaagcaccaacgacaacacctacttcggctacagcaccccctgggggtattttgacttcaacagattccactgccacttctcaccacgtgactggcagcgactcatcaacaacaactggggattccggccaaaaagactcagcttcaagctcttcaacatccaggtcaaggaggtcacgcagaatgaaggcaccaagaccatcgccaataaccttaccagcacgattcaggtatttacggactcggaataccagctgccgtacgtcctcggctccgcgcaccagggctgcctgcctccgttcccggcggacgtcttcatgattccccagtacggctaccttacactgaacaatggaagtcaagccgtaggccgttcctccttctactgcctggaatattttccatctcaaatgctgcgaactggaaacaattctgaattcagctacaccttcgaggacgtgcctttccacagcagctacgcacacagccagagcttggaccgactgatgaatcctctcatcgaccagtacctgtactacttatccagaactcagtccacaggaggaactcaaggtacccagcaattgttattttctcaagctgggcctgcaaacatgtcggctcaggctaagaactggctacctggaccttgctaccggcagcagcgagtctctacgacactgtcgcaaaacaacaacagcaactttgcttggactggtgccaccaaatatcacctgaacggaagagactctttggtaaatcccggtgtcgccatggcaacccacaaggacgacgaggaacgcttcttcccgtcgagtggagtcctgatgtttggaaaacagggtgctggaagagacaatgtggactacagcagcgttatgctaaccagcgaagaagaaattaaaaccactaaccctgtagccacagaacaatacggtgtggtggctgacaacttgcagcaaaccaatacagggcctattgtgggaaatgtcaacagccaaggagccttacctggcatggtctggcagaaccgagacgtgtacctgcagggtcccatctgggccaagattcctcacacggacggcaacttccacccttcaccgctaatgggaggatttggactgaagcacccacctcctcagatcctgatcaagaacacgccggtacctgcggatcctccaacaacgttcagccaggcgaaattggcttccttcattacgcagtacagcaccggacaggtcagcgtggaaatcgagtgggagctgcagaaggagaacagcaaacgctggaacccagagattcagtacacttcaaactactacaaatctacaaatgtggactttgctgtcaatacagagggaacttattctgagcctcgccccattggtactcgttacctcacccgtaatctgtaa

SEQ ID NO: 2645 - protein, 738 aa, Artificial Sequence
  Synthetic polypeptide
MAADGYLPDWLEDNLSEGIREWWDLKPGAPKPKANQQKQDDGRGLVLPGYKYLGPFNGLDKGEPVNAADAAALEHDKAYDQQLKAGDNPYLRYNHADAEFQERLQEDTSFGGNLGRAVFQAKKRVLEPLGPVEEAAKTAPGKKRPVEPPPQRSPDSSTGIGKKGQQPAKKRLNFGQTGDSESVPDPQPIGEPPAGPSGLGSGTMAAGGGAPMADNNEGADGVGSSSGNWHCDSTWLGDRVITTSTRTWALPTYNNHLYKQISNGTSGGSTNDNTYFGYSTPWGYFDFNRFHCHFSPRDWQRLINNNWGFRPKRLSFKLFNIQVKEVTQNEGTKTVANNLTSTIQVFTDSEYQLPYVLGSAHQGCLPPFPADVFMIPQYGYLTLNNGSQAVGRSSFYCLEYFPSQMLRTGNNFEFSYTFEDVPFHSSYAHSQSLDRLMNPLIDQYLYYLSRTQSTGGTQGTQQLLFSQAGPANMSAQAKNWLPGPCYRQQRVSTTLSQNNNSNFAWTGATKYHLNGRDSLVNPGVAMATHKDDEERFFPSSGVLMFGKQGAGRDNVDYSSVMLTSEEEIKTTNPVATEQYGVVADNLQQTNTGPIVGNVNSQGALPGMVWQNRDVYLQGPIWAKIPHTDGNFHPSPLMGGFGLKHPPPQILIKNTPVPADPPTTFSQAKLASFITQYSTGQVSVEIEWELQKENSKRWNPEIQYTSNYYKSTNVDFAVNTEGTYSEPRPIGTRYLTRNL

SEQ ID NO: 2646 - DNA, 2217 bp, Artificial Sequence
  Synthetic polynucleotide
atggctgctgacggttatcttccagattggctcgaggacaacctctctgagggcattcgcgagtggtgggacctgaaacctggagcccccaagcccaaggccaaccagcagaagcaggacgacggccggggtctggtgcttcctggctacaagtacctcggacccttcaacggactcgacaagggggagcccgtcaacgcggcggacgcagcggccctcgagcacgacaaggcctacgaccagcagctcaaagcgggtgacaatccgtacctgcggtataaccacgccgacgccgagtttcaggagcgtctacaagaagatacgtcttttgggggcaacctcgggcgagcagtcttccaggccaagaagcgggttctcgaacctctcggtccggttgaggaagctgctaagacggctcctggaaagaagagaccggtagaaccgccacctcagcgttcccccgactcctccacgggcatcggcaagaaaggccagcagcccgctaaaaagagactgaactttggtcagactggcgactcagagtcagtccccgaccctcaaccaatcggagaaccaccagcaggcccctctggtctgggatctggtacaatggctgcaggcggtggcgctccaatggcagacaataacgaaggcgccgacggagtgggtagttcctcaggaaattggcattgcgattccacatggctgggcgacagagtcatcaccaccagcacccgaacctgggccctgcccacctacaacaaccacctctacaagcaaatatccaatgggacatcgggaggaagcaccaacgacaacacctacttcggctacagcaccccctgggggtattttgacttcaacagattccactgccacttctcaccacgtgactggcagcgactcatcaacaacaactggggattccggccaaaaagactcagcttcaagctcttcaacatccaggtcaaggaggtcacgcagaatgaaggcaccaagaccgtcgccaataaccttaccagcacgattcaggtatttacggactcggaataccagctgccgtacgtcctcggctccgcgcaccagggctgcctgcctccgttcccggcggacgtcttcatgattccccagtacggctaccttacactgaacaatggaagtcaagccgtaggccgttcctccttctactgcctggaatattttccatctcaaatgctgcgaactggaaacaattttgaattcagctacaccttcgaggacgtgcctttccacagcagctacgcacacagccagagcttggaccgactgatgaatcctctcatcgaccagtacctgtactacttatccagaactcagtccacaggaggaactcaaggtacccagcaattgttattttctcaagctgggcctgcaaacatgtcggctcaggctaagaactggctacctggaccttgctaccggcagcagcgagtctctacgacactgtcgcaaaacaacaacagcaactttgcttggactggtgccaccaaatatcacctgaacggaagagactctttggtaaatcccggtgtcgccatggcaacccacaaggacgacgaggaacgcttcttcccgtcgagtggagtcctgatgtttggaaaacagggtgctggaagagacaatgtggactacagcagcgttatgctaaccagcgaagaagaaattaaaaccactaaccctgtagccacagaacaatacggtgtggtggctgacaacttgcagcaaaccaatacagggcctattgtgggaaatgtcaacagccaaggagccttacctggcatggtctggcagaaccgagacgtgtacctgcagggtcccatctgggccaagattcctcacacggacggcaacttccacccttcaccgctaatgggaggatttggactgaagcacccacctcctcagatcctgatcaagaacacgccggtacctgcggatcctccaacaacgttcagccaggcgaaattggcttccttcattacgcagtacagcaccggacaggtcagcgtggaaatcgagtgggagctgcagaaggagaacagcaaacgttggaacccagagattcagtacacttcaaactactacaaatctacaaatgtggactttgctgtcaatacagagggaacttattctgagcctcgccccattggtactcgttacctcacccgtaatctgtaa

SEQ ID NO: 2647 - protein, 738 aa, Artificial Sequence
  Synthetic polypeptide
MAADGYLPDWLEDNLSEGIREWWDLKPGAPKPKANQQKQDDGRGLVLPGYKYLGPFNGLDKGEPVNAADAAALEHDKAYDQQLKAGDNPYLRYNHADAEFQERLQEDTSFGGNLGRAVFQAKKRVLEPLGLVEEAAKTAPGKKRPVEPSPQRSPDSSTGIGKKGQQPAKKRLNFGQTGDSESVPDPQPIGEPPAGPSGLGSGTMAAGGGAPMADNNEGADGVGSSSGNWHCDSTWLGDRVITTSTRTWALPTYNNHLYKQISNGTSGGSTNDNTYFGYSTPWGYFDFNRFHCHFSPRDWQRLINNNWGFRPKRLSFKLFNIQVKEVTQNEGTKTIANNLTSTIQVFTDSEYQLPYVLGSAHQGCLPPFPADVFMIPQYGYLTLNNGSQAVGRSSFYCLEYFPSQMLRTGNNFEFSYTFEDVPFHSSYAHSQSLDRLMNPLIDQYLYYLSRTQSTGGTQGTQQLLFSQAGPANMSAQAKNWLPGPCYRQQRVSTTLSQSNNSNFAWTGATKYHLNGRDSLVNPGVAMATHKDDEERFFPSSGVLMFGKQGAGRDNVDYSSVMLTSEEEIKTTNPVATEQYGVVADNLQQTNTGPIVGNVNSQGALPGMVWQNRDVYLQGPIWAKIPHTDGNFHPSPLMGGLGLKHPPPQILIKNTPVPADPPTTFSQAKLASFITQYSTGQVSVEIEWELQKENSKRWNPEIQYTSNYYKSTNVDFAVNTEGTYSEPRPIGTRYLTRNL

SEQ ID NO: 2648 - DNA, 2217 bp, Artificial Sequence
  Synthetic polynucleotide
atggctgctgacggttatcttccagattggctcgaggacaacctctctgagggcattcgcgagtggtgggacctgaaacctggagcccccaagcccaaggccaaccagcagaagcaggacgacggccggggtctggtgcttcctggctacaagtacctcggacccttcaacggactcgacaagggggagcccgtcaacgcggcggacgcagcggccctcgagcacgacaaggcctacgaccagcagctcaaagcgggtgacaatccgtacctgcggtataaccacgccgacgccgagtttcaggagcgtctgcaagaagatacgtcttttgggggcaacctcgggcgagcagtcttccaggccaagaagcgggttctcgaacctctcggtctggttgaggaagcggctaagacggctcctggaaagaagagaccggtagaaccgtcacctcagcgttcccccgactcctccacgggcatcggcaagaaaggccagcagcccgctaaaaagagactgaactttggtcagactggcgactcagagtcagtccccgaccctcaaccaatcggagaaccaccagcaggcccctctggtctgggatctggtacaatggctgcaggcggtggcgctccaatggcagacaataacgaaggcgccgacggagtgggtagttcctcaggaaattggcattgcgattccacatggctgggcgacagagtcatcaccaccagcacccgaacctgggccctgcccacctacaacaaccacctctacaagcaaatatccaatgggacatcgggaggaagcaccaacgacaacacctacttcggctacagcaccccctgggggtattttgacttcaacagattccactgccacttctcaccacgtgactggcagcgactcatcaacaacaactggggattccggccaaaaagactcagcttcaagctcttcaacatccaggtcaaggaggtcacgcagaatgaaggcaccaagaccatcgccaataaccttaccagcacgattcaggtatttacggactcggaataccagctgccgtacgtcctcggctccgcgcaccagggctgcctgcctccgttcccggcggacgtcttcatgattccccagtacggctaccttacactgaacaatggaagtcaagccgtaggccgttcctccttctactgcctggaatattttccatctcaaatgctgcgaactggaaacaattttgaattcagctacaccttcgaggacgtgcctttccacagcagctacgcacacagccagagcttggaccgactgatgaatcctctcatcgaccagtacctgtactacttatccagaactcagtccacaggaggaactcaaggtacccagcaattgttattttctcaagctgggcctgcaaacatgtcggctcaggctaagaactggctacctggaccttgctaccggcagcagcgagtctctacgacactgtcgcaaagcaacaacagcaactttgcttggactggtgccaccaaatatcacctgaacggaagagactctttggtaaatcccggtgtcgccatggcaacccacaaggacgacgaggaacgcttcttcccgtcgagtggagtcctgatgtttggaaaacagggtgctggaagagacaatgtggactacagcagcgttatgctaaccagcgaagaagaaattaaaaccactaaccctgtagccacagaacaatacggtgtggtggctgacaacttgcagcaaaccaatacagggcctattgtgggaaatgtcaacagccaaggagccttacctggcatggtctggcagaaccgagacgtgtacctgcagggtcccatctgggccaagattcctcacacggacggcaacttccacccttcaccgctaatgggaggacttggactgaagcacccacctcctcagatcctgatcaagaacacgccggtacctgcggatcctccaacaacgttcagccaggcgaaattggcttccttcattacgcagtacagcaccggacaggtcagcgtggaaatcgagtgggagctgcagaaggagaacagcaaacgctggaacccagagattcagtacacttcaaactactacaaatctacaaatgtggactttgctgtcaatacagagggaacttattctgagcctcgccccattggtactcgttacctcacccgtaatctgtaa

SEQ ID NO: 2649 - protein, 737 aa, Artificial Sequence
  Synthetic polypeptide
MAADGYLPDWLEDNLSEGIREWWDLKPGAPKPKANQQKQDDGRGLVLPGYKYLGPFNGLDKGEPVNAADAAALEHDKAYDQQLKAGDNPYPRYNHADAEFQERLQEDTPFGGNLGRAVFQAKKRVLEPLGLVEEAAKTAPGKKRPVEPSPQRSPDSSTGIGKKGQQPAKKRLNFGQTGDSESVPDPQPIGEPPAGPSGLGSGTMAAGGGAPMADNNEGADGVGNASGNWHCDSTWLGDRVITTSTRTWALPTYNNHLYKQISSASTGASNDNHYFGYSTPWGYFDFNRFHCHFSPRDWQRLINNNWGFRPKRLNFKLFNIQVKEVTTNDGVTTIANNLTSTVQVFSDSEYQLPYVLGSAHQGCLPPFPADVFMIPQYGYLTLNNGSQAVGRSSFYCLEYFPSQMLRTGNNFTFSYTFEEVPLHSSYAHSQSLDRLMNPLIVQYLYYLNRTQNQSGSAQNKDLLFSRGSPAGMSVQPKNWLPGPCYRQQRVSKTKTDNNNSNFTWTGASKYNLNGRESIINPGTAMASHKDDEDKFFPMSGVMIFGKESAGASNTALDNVMITDEEEIKATNPVATERFGTVAVNFQSSSTDPATGDVHAMGALPGMVWQDRDVYLQGPIWAKIPHTDGHFHPSPLMGGFGLKNPPPQILIKNTPVPANPPAEFSATKFASFITQYSTGQVSVEIEWELQKENSKRWNPEVQYTSNYAKSASVDFTVDNNGLYTEPRPIGTRYLTRPL

SEQ ID NO: 2650 - protein, 737 aa, Artificial Sequence
  Synthetic polypeptide
MAADGYLPDWLEDNLSEGIREWWDLKPGAPKPKANQQKQDDGRGLVLPGYKYLGPFNGLDKGEPVNAADAAALEHDKAYDQQLKAGDNPYPRYNHADAEFQERLQEDTSFGGNLGRAVFQAKKRVLEPLGLVEEAAKTAPGKKRPVEPSPQRSPDSSTGIGKKGQQPAKKRLNFGQTGDSESVPDPQPIGEPPAGPSGLGSGTMAAGGGAPMADNNEGADGVGNASGNWHCDSTWLGDRVITTSTRTWALPTYNNHLYKQISSASTGASNDNHYFGYSTPWGYFDFNRFHCHFSPRDWQRLINNNWGFRPKRLNFKLFNIQVKEVTTNDGVTTIANNLTSTVQVFSDSEYQLPYVLGSAHQGCLPPFPADVFMIPQYGYLTLNNGSQAVGRSSFYCLEYFPSQMLRTGNNFTFSYTFEEVPLHSSYAHSQSLDRLMNPLIDQYLYYLNRTQNQSGSAQNKDLLFSRGSPAGMSVQPKNWLPGPCYRQQRVSKTKTDNNNSNFTWTGASKYNLNGRESIINPGTAMASHKDDEDKFFPMSGVMIFGKESAGASNTALDNVMITDEEEIKATNPVATERFGTVAVNFQSSSTDPATGDVHAMGALPGMVWQDRDVYLQGPIWAKIPHTDGHFHPSPLMGGFGLKNPPPQILIKNTPVPANPPAEFSATKFASFITQYSTGQVSVEIEWELQKENSKRWNPEVQYTSNYAKSASVDFTVDNNGLYTEPRPIGTRYLTRPL

SEQ ID NO: 2651 - DNA, 2214 bp, Artificial Sequence
  Synthetic polynucleotide
atggctgctgacggttatcttccagattggctcgaggacaacctctctgagggcattcgcgagtggtgggacctgaaacctggagcccccaagcccaaggccaaccagcagaagcaggacgacggccggggtctggtgcttcctggctacaagtacctcggacccttcaacggactcgacaagggggagcccgtcaacgcggcggacgcagcggccctcgagcacgacaaggcctacgaccagcagctcaaagcgggtgacaatccgtacccgcggtataaccacgccgacgccgagtttcaggagcgtctgcaagaagatacgccttttgggggcaacctcgggcgagcagtcttccaggccaagaagcgggttctcgaacctctcggtctggttgaggaagctgctaagacggctcctggaaagaagagaccggtagaaccgtcacctcagcgttcccccgactcctccacgggcatcggcaagaaaggccagcagcccgctaaaaagagactgaactttggtcagactggcgactcagagtcagtccccgaccctcaaccaatcggagaaccaccagcaggcccctctggtctgggatctggtacaatggctgcaggcggtggcgctccaatggcagacaataacgaaggcgccgacggagtgggtaatgcctcaggaaattggcattgcgattccacatggctgggcgacagagtcatcaccaccagcacccgcacctgggccttgcccacctacaataaccacctctacaagcaaatctccagtgcttcaacgggggccagcaacgacaaccactacttcggctacagcaccccctgggggtattttgatttcaacagattccactgccacttttcaccacgtgactggcagcgactcatcaacaacaattggggattccggcccaagagactcaacttcaaactcttcaacatccaagtcaaggaggtcacgacgaatgatggcgtcacaaccatcgctaataaccttaccagcacggttcaagtcttctcggactcggagtaccagcttccgtacgtcctcggctctgcgcaccagggctgcctccctccgttcccggcggacgtgttcatgattccgcaatacggctacctgacgctcaacaatggcagccaagccgtgggacgttcatccttttactgcctggaatatttcccttctcagatgctgagaacgggcaacaactttaccttcagctacacctttgaggaagtgcctctccacagcagctacgcgcacagccagagcctggaccggctgatgaatcctctcatcgtccaatacctgtattacctgaacagaactcaaaatcagtccggaagtgcccaaaacaaggacttgctgttcagccgtgggtctccagctggcatgtctgttcagcccaaaaactggctacctggaccctgttatcggcagcagcgcgtttctaaaacaaaaacagacaacaacaacagcaattttacctggactggtgcttcaaaatataacctcaatgggcgtgaatccatcatcaaccctggcactgctatggcctcacacaaagacgacgaagacaagttctttcccatgagcggtgtcatgatttttggaaaagagagcgccggagcttcaaacactgcattggacaatgtcatgattacagacgaagaggaaattaaagccactaaccctgtggccaccgaaagatttgggaccgtggcagtcaatttccagagcagcagcacagaccctgcgaccggagatgtgcatgctatgggagcattacctggcatggtgtggcaagatagagacgtgtacctgcagggtcccatttgggccaaaattcctcacacagatggacactttcacccgtctcctcttatgggcggctttggactcaagaacccgcctcctcagatcctcatcaaaaacacgcctgttcctgcgaatcctccggcggagttttcagctacaaagtttgcttcattcatcacccaatactccacaggacaagtgagtgtggaaattgaatgggagctgcagaaagaaaacagcaagcgctggaatcccgaagtgcagtacacatccaattatgcaaaatctgccagcgttgattttactgtggacaacaatggactttatactgagcctcgccccattggcacccgttaccttacccgtcccctgtaa

SEQ ID NO: 2652 - protein, 736 aa, Artificial Sequence
  Synthetic polypeptide
MAADGYLPDWLEDTLSEGIRQWWKLRPGPPPPKPAERHKDDSRGLVLPGYKYLGPFNGLDKGEPVNEADAAALEHDKAYDRQLDSGDNPYLKYNHADAEFQERLKEDTSFGGNLGRAVFQAKKRVLEPLGLVEEGAETAPGKKRPVEQSPQGPDSSSGIGKTGQQPAKKRLNFGQTGDSESVPDPQPLGEPPATPAAVGPTTMASGGGAPMADNNEGADGVGNASGNWHCDSTWLGDRVITTSTRTWALPTYNNHLYKQISSASTGASNDNHYFGYSTPWGYFDFNRFHCHFSPRDWQRLINNNWGFRPKRLNFKLFNIQVKEVTTNDGVTTIANNLTSTVQVFSDSEYQLPYVLGSAHQGCLPPFPADVFMIPQYGYLTLNNGSQAVGRSSFYCLEYFPSQMLRTGNNFTFSYTFEEVPFHSSYAHSQSLDRLMNPLIDQYLYYPNRTQNQSGSAQNKDLLFSRGSPAGMSVQPKNWLPGPCYRQQRVSKTKTDNNNSNFTWTGASKYNLNGRESIINPGTAMASHKDDEDKFFPMSGVMIFGKESAGASNTALDNVMITDEEEIKATNPVATERFGTVAVNFQSSSTDPATGDVHAMGALPGMVWQGRDVYLQGPIWAKIPHTDGHFHPSPLMGGFGLKNPPPQILIKNTPVPANPPAEFSATKFASFITQYSTGQVSVEIEWELQKENSKRWNPEVQYTSNYAKSANVDFTVDNNGLYTEPRPIGTRYLTRPL

SEQ ID NO: 2653 - DNA, 2211 bp, Artificial Sequence
  Synthetic polynucleotide
atggctgccgatggttatcttccagattggctcgaggacactctctctgaaggaataagacagtggtggaagctcagacctggcccaccaccaccaaagcccgcagagcggcataaggacgacagcaggggtcttgtgcttcctgggtacaagtacctcggacccttcaacggactcgacaagggagagccggtcaacgaggcagacgccgcggccctcgagcacgacaaagcctacgaccggcagctcgacagcggagacaacccgtacctcaagtacaaccacgccgacgcggagtttcaggagcgccttaaagaagatacgtcttttgggggcaacctcgggcgagcagtcttccaggccaagaagcgggttctcgaacctctcggtctggttgaggaaggcgctgagacggctcctggaaagaaacgtccggtagagcagtcgccacaagggccagactcctcctcgggcatcggcaagacaggccagcagcccgctaaaaagagactcaattttggtcagactggcgactcagagtcagtccccgatccacaacctctcggagaacctccagcaacccccgctgctgtgggacctactacaatggcttcaggcggtggcgcaccaatggcagacaataacgaaggcgccgacggagtgggtaatgcctcaggaaattggcattgcgattccacatggctgggcgacagagtcatcaccaccagcacccgcacctgggccttgcccacctacaataaccacctctacaagcaaatctccagtgcttcaacgggggccagcaacgacaaccactacttcggctacagcaccccctgggggtattttgatttcaacagattccactgccacttttcaccacgtgactggcagcgactcatcaacaacaattggggattccggcccaagagactcaacttcaaactcttcaacatccaagtcaaggaggtcacgacgaatgatggcgtcacaaccatcgctaataaccttaccagcacggttcaagtcttctcggactcggagtaccagcttccgtacgtcctcggctctgcgcaccagggctgcctccctccgttcccggcggacgtgttcatgattccgcaatacggctacctgacgctcaacaatggcagccaagccgtgggacgttcatccttttactgcctggaatatttcccttctcagatgctgagaacgggcaacaactttaccttcagctacacctttgaggaagtgcctttccacagcagctacgcgcacagccagagcctggaccggctgatgaatcctctcatcgaccaatacctgtattacccgaacagaactcaaaatcagtccggaagtgcccaaaacaaggacttgctgtttagccgtgggtctccagctggcatgtctgttcagcccaaaaactggctacctggaccctgttatcggcagcagcgcgtttctaaaacaaaaacagacaacaacaacagcaattttacctggactggtgcttcaaaatataacctcaatgggcgtgaatccatcatcaaccctggcactgctatggcctcacacaaagacgacgaagacaagttctttcccatgagcggtgtcatgatttttggaaaagagagcgccggagcttcaaacactgcattggacaatgtcatgattacagacgaagaggaaattaaagccactaaccctgtggccaccgaaagatttgggaccgtggcagtcaatttccagagcagcagcacagaccctgcgaccggagatgtgcatgctatgggagcattacctggcatggtgtggcaaggtagagacgtgtacctgcagggtcccatttgggccaaaattcctcacacagatggacactttcacccgtctcctcttatgggcggctttggactcaagaacccgcctcctcagatcctcatcaaaaacacgcctgttcctgcgaatcctccggcggagttttcagctacaaagtttgcttcattcatcacccaatactccacaggacaagtgagtgtggaaattgaatgggagctgcagaaagaaaacagcaagcgctggaatcccgaagtgcagtacacatccaattatgcaaaatctgccaacgttgattttactgtggacaacaatggactttatactgagcctcgccccattggcacccgttaccttacccgtcccctgtaa

SEQ ID NO: 2654 - protein, 736 aa, Artificial Sequence
  Synthetic polypeptide
MAADGYLPDWLEDTLSEGIRQWWKLRPGPPPPKPAERHKDDSRGLVLPGYKYLGPFNGLDKGEPVNEADAAALEHDKAYDRQLDSGDNPYLKYNHADAEFQERLKEDTSFGGNLGRAVFQAKKRVLEPLGLVEEGAKTAPGKKRPVEQSPQGPDSSSGIGKTGQQPAKKRLNFGQTGDSESVPDPQPLGEPPATPAAVGPTTMASGGGAPMADNNEGADGVGNASGNWHCDSTWLGDRVITTSTRTWALPTYNNHLYKQISSASTGASNDNHYFGYSTPWGYFDFNRFHCHFSPRDWQRLINNNWGFRPKRLNFKLFNIQVKEVTTNDGVTTIANNLTSTVQVFSDSEYQLPYVLGSAHQGCLPPFPADVFMIPQYGYLTLNNGSQAVGRSSFYCLEYFPSQMLRTGNNFTFSYTFEEVPFHSSYAHSQSLDRLMNPLIDQYLYYPNRTQNQSGSAQNKDLLFSRGSPAGMSVQPKNWLPGPCYRQQRVSKTKTDNNNSNFTWTGASKYNLNGRESIINPGTAMASHKDDEDKFFPMSGVMIFGKESAGASNTALDNVMITDEEEIKATNPVATERFGTVAVNFQSSSTDPATGDVHAMGALPGMVWQGRDVYLQGPIWAKIPHTDGHFHPSPLMGGFGLKNPPPQILIKNTPVPANPPAEFSATKFASFITQYSTGQVSVEIEWELQKENSKRWNPEVQYTSNYAKSANVDFTVDNNGLYTEPRPIGTRYLTRPL

SEQ ID NO: 2655 - protein, 736 aa, Artificial Sequence
  Synthetic polypeptide
MAADGYLPDWLEDTLSEGIRQWWKLRPGPPPPKPAERHKDDSRGLVLPGYKYLGPFNGLDKGEPVNEADAAALEHDKAYDRQLDSGDNPYLKYNHADAEFQERLKEDTSFGGNLGRAVFQAKKRVLEPLGLVEEGAKTAPGKKRPVEQSPQGPDSSSGIGKTGQQPAKKRLNFGQTGDSESVPDPQPLGEPPATPAAVGPTTMASGGGAPMADNNEGADGVGNASGNWHCDSTWLGDRVITTSTRTWALPTYNNHLYKQISSASTGASNDNHYFGYSTPWGYFDFNRFHCHFSPRDWQRLINNNWGFRPKRLNFKLFNIQVKEVTTNDGVTTIANNLTSTVQVFSDSEYQLPYVLGSAHQGCLPPFPADVFMIPQYGYLTLNNGSQAVGRSSFYCLEYFPSQMLRTGNNFTFSYTFEEVPFHSSYAHSQSLDRLMNPLIDQYLYYLNRTQNQSGSAQNKDLLFSRGSPAGMSVQPKNWLPGPCYRQQRVSKTKTDNNNSNFTWTGASKYNLNGRESIINPGTAMASHKDDEDKFFPMSGVMIFGKESAGASNTALDNVMITDEEEIKATNPVATERFGTVAVNFQSSSTDPATGDVHAMGALPGMVWQGRDVYLQGPIWAKIPHTDGHFHPSPLMGGFGLKNPPPQILIKNTPVPANPPAEFSATKFASFITQYSTGQVSVEIEWELQKENSKRWNPEVQYTSNYAKSANVDFTVDNNGLYTEPRPIGTRYLTRPL

SEQ ID NO: 2656 - protein, 736 aa, Artificial Sequence
  Synthetic polypeptide
MAADGYLPDWLEDTLSEGIRQWWKLRPGPPPPKPAERHKDDSRGLVLPGYKYLGPFNGLDKGEPVNEADAAALEHDKAYDRQLDSGDNPYLKYNHADAEFQERLKEDTSFGGNLGRAVFQAKKRVLEPLGLVEEGAKTAPGKKRPVEQSPQGPDSSSGIGKTGQQPAKKRLNFGQTGDSESVPDPQPLGEPPATPAAVGPTTMASGGGAPMADNNEGADGVGNASGNWHCDSTWLGDRVITTSTRTWALPTYNNHLYKQISSASTGASNDNHYFGYSTPWGYFDFNRFHCHFSPRDWQRLINNNWGFRPKRLNFKLFNIQVKEVTTNDGVTTIANNLTSTVQVFSDSEYQLPYVLGSAHQGCLPPFPADVFMIPQYGYLTLNNGSQAVGRSSFYCLEYFPSQMLRTGNNFTFSYTFEEVPFHSSYAHSQSLDRLMNPLIDQYLYYLNRTQNQSGSAQNKDLLFSRGSPAGMSVQPKNWLPGPCYRQQRVSKTKTDNNNSNFTWTGASKYNLNGRESIINPGTAMASHKDDEDKFFPMSGVMIFGKESAGASNTALDNVMITDEEEIKATNPVATERFGTVAVNFQSSSTDPATGDVHAMGALPGMVWQDRDVYLQGPIWAKIPHTDGHFHPSPLMGGFGLKNPPPQILIKNTPVPANPPAEFSATKFASFITQYSTGQVSVEIEWELQKENSKRWNPEVQYTSNYAKSANVDFTVDNNGLYTEPRPIGTRYLTRPL

SEQ ID NO: 2657 - DNA, 2208 bp, Artificial Sequence
  Synthetic polynucleotide
atggctgccgatggctatcttccagattggctcgaggacactctctctgaaggaataagacagtggtggaagctcaaacctggcccaccaccaccaaagcccgcagagcggcatagggacgacagcaggggtcttgtgcttcctgggtacaagtacctcggacccttcaacggactcgacaagggagagccggtcaacgaggcagacgccgcggccctcgagcacgacaaagcctacgaccggcagctcgacagcggagacaacccgtacctcaagtacaaccacgccgacgcggagtttcaggagcgccttaaagaagatacgtcttttgggggcaacctcggacgagcagtcttccaggcgaaaaagagggttcttgaacctctgggcctggttgaggaacctgttaagacggctccgggaaaaaagaggccggtagagcactctcctgtggagccagactcctcctcgggaaccggaaaggcgggccagcagcctgcaagaaaaagattgaattttggtcagactggagacgcagactcagtacctgacccccagcctctcggacagccaccagcagccccctctggtctgggaactaatacgatggctacaggcagtggcgcaccaatggcagacaataacgagggcgccgacggagtgggtaattcctcgggaaattggcattgcgattccacatggatgggcgacagagtcatcaccaccagcacccgaacctgggccctgcccacctacaacaaccacctctacaaacaaatttccagccaatcaggagcctcgaacgacaatcactactttggctacagcaccccttgggggtattttgacttcaacagattccactgccacttttcaccacgtgactggcaaagactcatcaacaacaactggggattccgacccaagagactcaacttcaagctctttaacattcaagtcaaagaggtcacgcagaatgacggtacgacgacgattgccaataaccttaccagcacggttcaggtgtttactgactcggggtaccagctcccgtacgtcctcggctcggcgcatcaaggatgcctcccgccgttcccagcagacgtcttcatggtgccacagtatggataccccaccctgaacaacgggagtcaggcagtaggacgctcttcattttactgcctggagtactttccttctcagatgctgcgtaccggaaacaactttaccttcagctacacttttgaggacgttcctttccacagcagctacgctcacagccagagtctggaccgtctcatgaatcctctcatcgaccagtacctgtattacttgagcacaacaaacactccaagtggaaccaccacgcagtcaaggcttcagttttctcaggccggagcgagtgacattcgggaccagtctaggaactggcttcctggaccctgttaccgccagcagcgagtatcaaagacatctgcggataacaacaacagtgaatactcgtggactggagctaccaagtaccacctcaatggcagagactctctggtgaatccgggcccggccgtggcaagccacaaggacgatgaagaaaagttttttcctcagagcggggttctcatctttgggaagcaaggctcagagaaaacaaatgtggacattgaaaaggtcatgattacagacgaagaggaaatcaggacaaccaatcccgtggctacggagcagtatggttctgtatctaccaacctccagagaggcaacagacaagcagctaccgcagatgtcaacacacaaggcgttcttccaggcatggtctggcaggacagagatgtgtaccttcaggggcccatctgggcaaagattccacacacggacggacattttcacccctctcccctcatgggtggattcggacttaaacaccctcctccacagattctcatcaagaacaccccggtacctgcgaatccttcgaccaccttcagtgcggcaaagtttgcttccttcatcacacagtactccacgggacaggtcagcgtggagatcgagtgggagctgcagaaggaaaacagcaaacgctggaatcccgaaattcagtacacttccaactacaacaagtctgttaatgtggactttactgtggacactaatggcgtgtattcagagcctcgccccattggcaccagatacctgactcgtaatctgtaa

SEQ ID NO: 2658 - protein, 735 aa, Artificial Sequence
  Synthetic polypeptide
MAADGYLPDWLEDTLSEGIRQWWKLKPGPPPPKPAERHRDDSRGLVLPGYKYLGPFNGLDKGEPVNEADAAALEHDKAYDRQLDSGDNPYLKYNHADAEFQERLKEDTSFGGNLGRAVFQAKKRVLEPLGLVEEPVKTAPGKKRPVEHSPVEPDSSSGTGKAGQQPARKRLNFGQTGDADSVPDPQPLGQPPAAPSGLGTNTMATGSGAPMADNNEGADGVGNSSGNWHCDSTWMGDRVITTSTRTWALPTYNNHLYKQISSQSGASNDNHYFGYSTPWGYFDFNRFHCHFSPRDWQRLINNNWGFRPKRLNFKLFNIQVKEVTQNDGTTTIANNLTSTVQVFTDSGYQLPYVLGSAHQGCLPPFPADVFMVPQYGYPTLNNGSQAVGRSSFYCLEYFPSQMLRTGNNFTFSYTFEDVPFHSSYAHSQSLDRLMNPLIDQYLYYLSTTNTPSGTTTQSRLQFSQAGASDIRDQSRNWLPGPCYRQQRVSKTSADNNNSEYSWTGATKYHLNGRDSLVNPGPAVASHKDDEEKFFPQSGVLIFGKQGSEKTNVDIEKVMITDEEEIRTTNPVATEQYGSVSTNLQRGNRQAATADVNTQGVLPGMVWQDRDVYLQGPIWAKIPHTDGHFHPSPLMGGFGLKHPPPQILIKNTPVPANPSTTFSAAKFASFITQYSTGQVSVEIEWELQKENSKRWNPEIQYTSNYNKSVNVDFTVDTNGVYSEPRPIGTRYLTRNL

SEQ ID NO: 2659 - DNA, 2211 bp, Artificial Sequence
  Synthetic polynucleotide
atggctgccgacggttatcttccagattggctcgaggacactctctctgaaggaataagacagtggtggaagctcaaacctggcccaccaccaccaaagcccgcagagcggcataaggacgacagcaggggtcttgtgcttcctgggtacaagtacctcggacccttcaacggactcgacaagggagagccggtcaacgaggcagacgccgcggccctcgagcacgacaaagcctacgaccggcagctcgacagcggagacaacccgtacctcaagtacaaccacgccgacgcggagtttcaggagcgccttaaagaagatacgtcttttgggggcaacctcgggcgggcagtcttccaggccaagaagcgggttctcgaacctctcggtctggttgaggaaggcgctaagacggctcctggaaagaaacgtccggtagagcagtcgccacaagagccagactccccctcgggcatcggcaagacaggccagcagcccgctaaaaagagactcaattttggtcagactggcgactcagagtcagtccccgatccacaacctctcggagaacctccagcaacccccgctgctgtgggacctactacaatggcttcaggcggtggcgcaccaatggcagacaataacgaaggcgccgacggagtgggtaatgcctcaggaaattggcactgcgattccacatggctgggcgacagagtcatcaccaccagcacccgcacctgggccttgcccacctacaataaccacctctacaagcaaatctccagtgcttcaacgggggccagcaacgacaaccactacttcggctacagcaccccctgggggtattttgatttcaacagattccactgccacttttcaccacgtgactggcagcgactcatcaacaacaattggggattccggcccaagagactcaacttcaaactcttcaacatccaagtcaaggaggtcacgacgaatgatggcgtcacaaccatcgctaataaccttaccagcacggttcaagtcttctcggactcggagtaccagcttccgtacgtcctcggctctgcgcaccagggccgcctccctccgttcccggcggacgtgttcatgattccgcaatacggctacctgacgctcaacaatggcagccaagccgtgggacgttcatcctcttactgcctggaatatttcccttctcagatgctgagaacgggcaacaactttaccttcagctacacctttgaggaagtgcctctccacagcagctgcgcgcacagccagagcctggaccggctgatgaatcctctcatcgaccaatacctgtattacctgaacagaactcaaaatcagtccggaagtgcccaaaacagggacttgctgttcagccgtgggtctccagctggcatgtctgttcagcccaaaaactggctacctggaccctgttatcggcagcagcgcgtttctaaaacaaaaacagacaacaacaacagcaattttacctggactggtgcttcaaaatataacctcaatgggcgtgaatccatcatcaaccctggcactgctatggcctcacacaaagacgacgaagacaagttctttcccatgagcggtgtcatgatttttggaaaagagagcgccggagcttcaaacactgcattggacaatgtcatgattacagacgaagaggaaattaaagccactaaccctgtggccaccgaaagatttgggaccgtggcagtcaatttccagagcagcagcacagaccctgcgaccggagatgtgcatgctatgggagcattacctggcatggtgtggcaagatagagacgtgtacctgcagggtcccatttgggccaaaattcctcacacagatggacactttcacccgtctcctcttatgggcggctttggactcaagaacccgcctcctcagatcctcatcaaaaacacgcctgttcctgcgaatcctccggcggagttttcagctacaaagtttgcttcattcatcacccaatactccgcaggacaagtgagtgtggaaattgaatgggagctgcagaaagaaaacagcaagcgctggaatcccgaagtgcagtacacatccaattatgcaaaatctgccaacgttgattttactgtggacaacaatggactttatactgagcctcgccccattggcacccgttaccttacccgtcccctgtaa

SEQ ID NO: 2660 - protein, 736 aa, Artificial Sequence
  Synthetic polypeptide
MAADGYLPDWLEDTLSEGIRQWWKLKPGPPPPKPAERHKDDSRGLVLPGYKYLGPFNGLDKGEPVNEADAAALEHDKAYDRQLDSGDNPYLKYNHADAEFQERLKEDTSFGGNLGRAVFQAKKRVLEPLGLVEEGAKTAPGKKRPVEQSPQEPDSPSGIGKTGQQPAKKRLNFGQTGDSESVPDPQPLGEPPATPAAVGPTTMASGGGAPMADNNEGADGVGNASGNWHCDSTWLGDRVITTSTRTWALPTYNNHLYKQISSASTGASNDNHYFGYSTPWGYFDFNRFHCHFSPRDWQRLINNNWGFRPKRLNFKLFNIQVKEVTTNDGVTTIANNLTSTVQVFSDSEYQLPYVLGSAHQGRLPPFPADVFMIPQYGYLTLNNGSQAVGRSSSYCLEYFPSQMLRTGNNFTFSYTFEEVPLHSSCAHSQSLDRLMNPLIDQYLYYLNRTQNQSGSAQNRDLLFSRGSPAGMSVQPKNWLPGPCYRQQRVSKTKTDNNNSNFTWTGASKYNLNGRESIINPGTAMASHKDDEDKFFPMSGVMIFGKESAGASNTALDNVMITDEEEIKATNPVATERFGTVAVNFQSSSTDPATGDVHAMGALPGMVWQDRDVYLQGPIWAKIPHTDGHFHPSPLMGGFGLKNPPPQILIKNTPVPANPPAEFSATKFASFITQYSAGQVSVEIEWELQKENSKRWNPEVQYTSNYAKSANVDFTVDNNGLYTEPRPIGTRYLTRPL

SEQ ID NO: 2661 - protein, 736 aa, Artificial Sequence
  Synthetic polypeptide
MAADGYLPDWLEDTLSEGIRQWWKLKPGPPPPKPAERHKDDSRGLVLPGYKYLGPFNGLDKGEPVNEADAAALEHDKAYDRQLDSGDNPYLKYNHADAEFQERLKEDTSFGGNLGRAVFQAKKRVLEPLGLVEEGAKTAPGKKRPVEQSPQEPDSSSGIGKTGQQPAKKRLNFGQTGDSESVPDPQPLGEPPATPAAVGPTTMASGGGAPMADNNEGADGVGNASGNWHCDSTWLGDRVITTSTRTWALPTYNNHLYKQISSASTGASNDNHYFGYSTPWGYFDFNRFHCHFSPRDWQRLINNNWGFRPKRLNFKLFNIQVKEVTTNDGVTTIANNLTSTVQVFSDSEYQLPYVLGSAHQGCLPPFPADVFMIPQYGYLTLNNGSQAVGRSSFYCLEYFPSQMLRTGNNFTFSYTFEEVPLHSSCAHSQSLDRLMNPLIDQYLYYLNRTQNQSGSAQNRDLLFSRGSPAGMSVQPKNWLPGPCYRQQRVSKTKTDNNNSNFTWTGASKYNLNGRESIINPGTAMASHKDDEDKFFPMSGVMIFGKESAGASNTALDNVMITDEEEIKATNPVATERFGTVAVNFQSSSTDPATGDVHAMGALPGMVWQDRDVYLQGPIWAKIPHTDGHFHPSPLMGGFGLKNPPPQILIKNTPVPANPPAEFSATKFASFITQYSTGQVSVEIEWELQKENSKRWNPEVQYTSNYAKSANVDFTVDNNGLYTEPRPIGTRYLTRPL

SEQ ID NO: 2662 - DNA, 2208 bp, Artificial Sequence
  Synthetic polynucleotide
atggctgccgatggctatcttccagattggctcgaggacactctctctgaaggaataagacagtggtggaagctcaaacctggcccaccaccaccaaagcccgcagagcggcatagggacgacagcaggggtcttgtgcttcctgggtacaagtacctcggacccttcaacggactcgacaagggagagccggtcaacgaggcagacgccgcggccctcgagcacgacaaagcctacgaccggcagctcgacagcggagacaacccgtacctcaagtacaaccacgccgacgcggagtttcaggagcgccttaaagaagatacgtcttttgggggcaacctcggacgagcagtcttccaggcgaaaaagagggttcttgaacctctgggcctggttggggaacctgttaagacggctccgggaaaaaagaggccggtagagcactctcctgtggagccagactcctcctcgggaaccggaaaggcgggccagcagcctgcaagaaaaagattgaattttggtcagactggagacgcagactcagtacctgacccccagcctctcggacagccaccagcagccccctctggtctgggaactaatacgatggctacaggcagtggcgcaccaatggcagacaataacgagggcgccgacggagtgggtaattcctcgggaaattggcattgcgattccacatggatgggcgacagagtcatcaccaccagcacccgaacctgggccctgcccacctacaacaaccacctctacaaacaaatttccagccaatcaggagcctcgaacgacagtcactactttggctacagcaccccttgggggtattttgacttcaacagattccactgccacttttcaccacgtgactggcaaagactcatcaacaacaactggggattccgacccaagagactcaacttcaagctctttaacattcaagtcaaagaggtcacgcagaatgacggtacgacgacgattgccaataaccttaccagcacggttcaggtgtttactgactcggagtaccagctcccgtacgtcctcggctcggcgcatcaaggatgcctcccgccgttcccagcagacgtcttcatggtgccacagtatggatacctcaccctgaacaacgggagtcaggcagtaggacgctcttcattttactgcctggagtactttccttctcagatgctgcgtaccggaaacaactttaccttcagctacacttttgaggacgttcctttccacagcagctacgctcacagccagagtctggaccgtctcatgaatcctctcatcgaccagtacctgtattacttgagcacaacaaacactccaagtggaaccaccacgcagtcaaggctccagttttctcaggccggagcgagtgacattcgggaccagtctaggaactggcttcctggaccctgttaccgccagcagcgagtatcaaagacatctgcggataacaacaacagtgaatactcgtggactggagctaccaagtaccacctcaatggcagagactctctggtgaatccgggcccggccatggcaagccacaaggacaatgaagaaaagttttttcctcagagcggggttctcatctttgggaagcaaggctcagagaaaacaaatgtggacattgaaaaggtcatgattacagacgaagaggaaatcaggacaaccaatcccgtggctacggagcagtatggttctgtatctaccaacctccagagaggcaacagacaagcagctaccgcagatgtcaacacacaaggcgttcttccaggcatggtctggcaggacagagatgtgtaccttcaggggcccatctgggcaaagattccacacacggacggacattttcacccctctcccctcatgggtggattcggacttaaacaccctcctccacagattctcatcaagaacaccccggtacctgcgaatccttcgaccaccttcagtgcggcaaagtttgcttccttcatcacacagtactccacgggacaggtcagcgtggagatcgagtgggagctgcagaaggaaaacagcaaacgctggaatcccgaaattcagtacacttccaactacaacaagtctgttaatgtggactttactgtggacactaatggcgtgtattcagagcctcgccccattggcaccagatacctgactcgtaatctgtaa

SEQ ID NO: 2663 - protein, 735 aa, Artificial Sequence
  Synthetic polypeptide
MAADGYLPDWLEDTLSEGIRQWWKLKPGPPPPKPAERHRDDSRGLVLPGYKYLGPFNGLDKGEPVNEADAAALEHDKAYDRQLDSGDNPYLKYNHADAEFQERLKEDTSFGGNLGRAVFQAKKRVLEPLGLVGEPVKTAPGKKRPVEHSPVEPDSSSGTGKAGQQPARKRLNFGQTGDADSVPDPQPLGQPPAAPSGLGTNTMATGSGAPMADNNEGADGVGNSSGNWHCDSTWMGDRVITTSTRTWALPTYNNHLYKQISSQSGASNDSHYFGYSTPWGYFDFNRFHCHFSPRDWQRLINNNWGFRPKRLNFKLFNIQVKEVTQNDGTTTIANNLTSTVQVFTDSEYQLPYVLGSAHQGCLPPFPADVFMVPQYGYLTLNNGSQAVGRSSFYCLEYFPSQMLRTGNNFTFSYTFEDVPFHSSYAHSQSLDRLMNPLIDQYLYYLSTTNTPSGTTTQSRLQFSQAGASDIRDQSRNWLPGPCYRQQRVSKTSADNNNSEYSWTGATKYHLNGRDSLVNPGPAMASHKDNEEKFFPQSGVLIFGKQGSEKTNVDIEKVMITDEEEIRTTNPVATEQYGSVSTNLQRGNRQAATADVNTQGVLPGMVWQDRDVYLQGPIWAKIPHTDGHFHPSPLMGGFGLKHPPPQILIKNTPVPANPSTTFSAAKFASFITQYSTGQVSVEIEWELQKENSKRWNPEIQYTSNYNKSVNVDFTVDTNGVYSEPRPIGTRYLTRNL

SEQ ID NO: 2664 - protein, 737 aa, Artificial Sequence
  Synthetic polypeptide
RMAADGYLPDWLEDNLSEGIREWWDLKPGAPKPKANQQKQDDGRGLVLPGYKYLGPFNGLDKGEPVNAADAAALEHDKAYDQQLKAGDNPYLRYNHADAEFQERLQEDTSFGGNLGRAVFQAKKRVLEPLGLVEEGAKTAPGKKRPVEQSPQEPDSSSGIGKTGQQPAKKRLNFGQTGDSESVPDPQPLGEPPATPAAVGPTTMASGGGAPMADNNEGADGVGNASGNWHCDSTWLGDRVITTSTRTWALPTYNNHLYKQISSTSTGASNDNHYFGYGTPWGYFDFNRFHCHFSPRDWQRLINNNWGFRPKRLNFKLFNIQVEEVTTNDGVTTIANNLTSTVQVFSDSEYQLPYVLGSAHQGCLPPFPADVFMIPQYGYLTLNNGSQAVGRSSFYCLEYFPSQMLRTGNNFTFSYTFEEVPFHSSYAHSQSLDRLMNPLIDQYLYYLNRTQNQSGSAQNKDLLFSRGSPAGMSVQPKNWLPGPCYRQQRVSKTKTDNNNSNFTWTGASKYNLNGRESIINPGTAVASHKDDEDKFFPMSGVMIFGKESAGASSTALDNVMITDEEEIKATNPVATERFGTVAVNFQSSSTDPATGDVHAMGALPGMVWQDRDVYLQGPIWAKIPHTDGHFHPSPLMGGFGLKNPPPQILIKNTPVPANPPAEFSATKFASFITQYSTGQVSVEIEWELQKENSKRWNPEVQYTSNYAKSANVDFTVDNNGLYTEPRPIGTRYLTRPL

SEQ ID NO: 2665 - protein, 736 aa, Artificial Sequence
  Synthetic polypeptide
MAADGYLPDWLEDNLSEGIREWWDLKPGAPKPKANQQKQDDGRGLVLPGYKYLGPFNGLDKGEPVNAADAAALEHDKAYDQQLKAGDNPYLRYNHADAEFQERLQEDTSFGGNLGRAVFQAKKRVLEPLGLVEEGAKTAPGKKRPVEQSPQEPDSSSGIGKTGQQPAKKRLNFGQTGDSESVPDPQPLGEPPATPAAVGPTTMASGGGAPMADNNEGADGVGNASGNWHCDSTWLGDRVITTSTRTWALPTYNNHLYKQISSTSTGASNDNHYFGYGTPWGYFDFNRFHCHFSPRDWQRLINNNWGFRPKRLNFKLFNIQVEEVTTNDGVTTIANNLTSTVQVFSDSEYQLPYVLGSAHQGCLPPFPADVFMIPQYGYLTLNNGSQAVGRSSFYCLEYFPSQMLRTGNNFTFSYTFEEVPFHSSYAHSQSLDRLMNPLIDQYLYYLNRTQNQSGSAQNKDLLFSRGSPAGMSVQPKNWLPGPCYRQQRVSKTKTDNNNSNFTWTGASKYNLNGRESIINPGTAVASHKDDEDKFFPMSGVMIFGKESAGASSTALDNVMITDEEEIKATNPVATERFGTVAVNFQSSSTDPATGDVHAMGALPGMVWQDRDVYLQGPIWAKIPHTDGHFHPSPLMGGFGLKNPPPQILIKNTPVPANPPAEFSATKFASFITQYSTGQVSVEIEWELQKENSKRWNPEVQYTSNYAKSANVDFTVDNNGLYTEPRPIGTRYLTRPL

SEQ ID NO: 2666 - DNA, 2211 bp, Artificial Sequence
  Synthetic polynucleotide
atggctgccgatggttatcttccagattggctcgaggacaacctctctgagggcattcgcgagtggtgggacttgaaacctggagccccgaagcccaaagccaaccagcaaaagcaggacgacggccggggtctggtgcttcctggctacaagtacctcggacccttcaacggactcgacaagggggagcccgtcaacgcggcggacgcagcggccctcgagcacgacaaggcctacgaccagcagctcaaagcgggtgacaatccgtacctgcggtataaccacgccgacgccgagtttcaggagcgtctgcaagaagatacgtcttttgggggcaacctcgggcgagcagtcttccaggccaagaagcgggttctcgaacctctcggtctggttgaggaaggcgctaagacggctcctggaaagaaacgtccggtagagcagtcgccacaagagccagactcctcctcgggcatcggcaagacaggccagcagcccgctaaaaagagactcaattttggccagactggcgactcagagtcagtccccgatccacaacctctcggagaacctccagcaacccccgctgctgtgggacctactacaatggcttcaggcggtggcgcaccaatggcagacaataacgaaggcgccgacggagtgggtaatgcctcaggaaattggcattgcgattccacatggctgggcgacagagtcatcaccaccagcacccgcacctgggccttgcccacctacaataaccacctctacaagcaaatctccagtacttcaacgggggccagcaacgacaaccactacttcggctacggcaccccctgggggtattttgatttcaacagattccactgccacttttcaccacgtgactggcagcgactcatcaacaacaattggggattccggcccaagagactcaacttcaaactcttcaacatccaagtcgaggaggtcacgacgaatgatggcgtcacaaccatcgctaataaccttaccagcacggttcaagtcttctcggactcggagtaccagcttccgtacgtcctcggctctgcgcaccagggctgcctccctccgttcccggcggacgtgttcatgattccgcaatacggctacctgacgctcaacaatggcagccaagccgtgggacgttcatccttttactgcctggaatatttcccttctcagatgctgagaacgggcaacaactttaccttcagctacacctttgaggaagtgcctttccacagcagctacgcgcacagccagagcctggaccggctgatgaatcctctcatcgaccaatacctgtattacctgaacagaacacaaaatcagtccggaagtgcccaaaacaaggacttgctgtttagccgtgggtctccagctggcatgtctgttcagcccaaaaactggctacctggaccctgttatcggcagcagcgcgtttctaaaacaaaaacagacaacaacaacagcaattttacctggactggtgcttcaaaatataacctcaatgggcgtgaatccatcatcaaccctggcaccgctgtggcctcacacaaagacgacgaagacaagttctttcccatgagcggtgtcatgatttttggaaaagagagcgccggagcttcaagcactgcattggacaatgtcatgattacagacgaagaggaaattaaagccactaaccctgtggccaccgaaagatttgggaccgtggcagtcaatttccagagcagcagcacagaccctgcgaccggagatgtgcatgctatgggagcattacctggcatggtgtggcaagatagagacgtgtacctgcagggtcccatttgggccaaaattcctcacacagatggacactttcacccgtctcctcttatgggcggctttggactcaagaacccgcctcctcagatcctcatcaaaaacacgcctgttcctgcgaatcctccggcggagttttcagctacaaagtttgcttcattcatcacccaatactccacaggacaagtgagtgtggaaattgaatgggagctgcagaaagaaaacagcaagcgctggaatcccgaagtgcagtacacatccaattatgcaaaatctgccaacgttgattttactgtggacaacaatggactttatactgagcctcgccccattggcacccgttaccttacccgtcccctgtaa

SEQ ID NO: 2667 - protein, 737 aa, Artificial Sequence
  Synthetic polypeptide
RMAADGYLPDWLEDNLSEGIREWWDLKPGAPKPKANQQKQDDGRGLVLPGYKYLGPFNGLDKGEPVNAADAAALEHDKAYDQQLKAGDNPYLRYNHADAEFQERLQEDTSFGGNLGRAVFQAKKRVLEPLGLVEEGAKTAPGKKRPVEQSPQEPDSSSGIGKTGQQPAKKRLNFGQTGDSESVPDPQPLGEPPATPAAVGPTTMASGGGAPMADNNEGADGVGNASGNWHCDSTWLGDRVITTSTRTWALPTYNNHLYKQISSTSTGASNDNHYFGYSTPWGYFDFNRFHCHFSPRDWQRLINNNWGFRPKRLNFKLFNIQVEEVTTNDGVTTIANNLTSTVQVFSDSEYQLPYVLGSAHQGCLPPFPADVFMIPQYGYLTLNNGSQAVGRSSFYCLEYFPSQMLRTGNNFTFSYTFEEVPFHSSYAHSQSLDRLMNPLIDQYLYYLNRTQNQSGSAQNKDLLFSRGSPAGMSVQPKNWLPGPCYRQQRVSKTKTDNNNSNFTWTGASKYNLNGRESIINPGTAVASHKDDEDKFFPMSGVMIFGKESAGASSTALDNVMITDEEEIKATNPVATERFGTVAVNFQSSSTDPATGDVHAMGALPGMVWQDRDVYLQGPIWAKIPHTDGHFHPSPLMGGFGLKNPPPQILIKNTPVPANPPAEFSATKFASFITQYSTGQVSVEIEWELQKENSKRWNPEVQYTSNYAKSANVDFTVDNNGLYTEPRPIGTRYLTRPL

SEQ ID NO: 2668 - protein, 737 aa, Artificial Sequence
  Synthetic polypeptide
RMAADGYLPDWLEDNLSEGIREWWDLKPGAPKPKANQQKQDDGRGLVLPGYKYLGPFNGLDKGEPVNAADAAALEHDKAYDQQLKAGDNPYLRYNHADAEFQERLQEDTSFGGNLGRAVFQAKKRVLEPLGLVEEGAKTAPGKKRPVEQSPQEPDSSSGIGKTGQQPAKKRLNFGQTGDSESVPDPQPLGEPPATPAAVGPTTMASGGGAPMADNNEGADGVGNASGNWHCDSTWLGDRVITTSTRTWALPTYNNHLYKQISSTSTGASNDNHYFGYSTPWGYFDFNRFHCHFSPRDWQRLINNNWGFRPKRLNFKLFNIQVKEVTTNDGVTTIANNLTSTVQVFSDSEYQLPYVLGSAHQGCLPPFPADVFMIPQYGYLTLNNGSQAVGRSSFYCLEYFPSQMLRTGNNFTFSYTFEEVPFHSSYAHSQSLDRLMNPLIDQYLYYLNRTQNQSGSAQNKDLLFSRGSPAGMSVQPKNWLPGPCYRQQRVSKTKTDNNNSNFTWTGASKYNLNGRESIINPGTAVASHKDDEDKFFPMSGVMIFGKESAGASSTALDNVMITDEEEIKATNPVATERFGTVAVNFQSSSTDPATGDVHAMGALPGMVWQDRDVYLQGPIWAKIPHTDGHFHPSPLMGGFGLKNPPPQILIKNTPVPANPPAEFSATKFASFITQYSTGQVSVEIEWELQKENSKRWNPEVQYTSNYAKSANVDFTVDNNGLYTEPRPIGTRYLTRPL

SEQ ID NO: 2669 - protein, 737 aa, Artificial Sequence
  Synthetic polypeptide
RMAADGYLPDWLEDNLSEGIREWWDLKPGAPKPKANQQKQDDGRGLVLPGYKYLGPFNGLDKGEPVNAADAAALEHDKAYDQQLKAGDNPYLRYNHADAEFQERLQEDTSFGGNLGRAVFQAKKRVLEPLGLVEEGAKTAPGKKRPVEQSPQEPDSSSGIGKTGQQPAKKRLNFGQTGDSESVPDPQPLGEPPATPAAVGPTTMASGGGAPMADNNEGADGVGNASGNWHCDSTWLGDRVITTSTRTWALPTYNNHLYKQISSTSTGASNDNHYFGYSTPWGYFDFNRFHCHFSPRDWQRLINNNWGFRPKRLNFKLFNIQVKEVTTNDGVTTIANNLTSTVQVFSDSEYQLPYVLGSAHQGCLPPFPADVFMIPQYGYLTLNNGSQAVGRSSFYCLEYFPSQMLRTGNNFTFSYTFEEVPFHSSYAHSQSLDRLMNPLIDQYLYYLNRTQNQSGSAQNKDLLFSRGSPAGMSVQPKNWLPGPCYRQQRVSKTKTDNNNSNFTWTGASKYNLNGRESIINPGTAVASHKDDEDKFFPMSGVMIFGKESAGANSTALDNVMITDEEEIKATNPVATERFGTVAVNFQSSSTDPATGDVHAMGALPGMVWQDRDVYLQGPIWAKIPHTDGHFHPSPLMGGFGLKNPPPQILIKNTPVPANPPAEFSATKFASFITQYSTGQVSVEIEWELQKENSKRWNPEVQYTSNYAKSANVDFTVDNNGLYTEPRPIGTRYLTRPL

SEQ ID NO: 2670 - DNA, 2208 bp, Artificial Sequence
  Synthetic polynucleotide
atggctgccgatggttatcttccagattggctcaaggacactctctctgaaggaataagacagtggtggaagctcaaacctggcccaccaccaccaaagcccgcagagcggcataaggacgacagcgggggtcttgtgcttcctgggtacaagtacctcggacccttcaacggactcgacaagggagagccggtcaacgaggcagacgccgcggccctcgagtacgacaaggcctacgaccggcagctcgacagcggagacaacccgtacctcaagtacaaccacgccgacgcggagtttcaggagcgccttaaagaagatacgtcttttgggggcaacctcggacgagcagtcttccaggcgaaaaagagggttcttgaacctctgggcctggttgaggaacctgttaagacggctccgggaaaaaagaggccggtagagcactctcctgtggagccagactcctcctcgggaacaggaaaagcgggccagcagcctgcgagaaagagattgaattttggtcagactggagacgcagactccgtacctgacccccagcctctcggacagccaccagcagccccctctggtctgggaactaatacgatggctacaggcagtggcgcaccaatggcagacaataacgagggcgccgacggagtgggtaattcctcgggaagttggcattgcgattccacatggatgggcgacagagtcatcaccaccagcacccgaacctgggctctgcccacctacaacaaccatctgtacaagcagatctccagccaatcaggagccagcaacgacaaccactactttggctacagcaccccttgggggtattttgacttcaacagattccactgccacttttcaccacgtgactggcaaagactcatcaacaacaactggggattccggcccaagagactcaacttcaagctctttaacattcaagtcaaggaggtcacgcagaatgacggtacgacgacgattgccaataaccttaccagcacggttcaggtgtttactgactcggagtaccagctcccgtacgtccccggctcggcgcatcaaggatgcctcccgccgttcccagcagacgtcttcatggtgccacagtatggatacctcaccctgaacaacgggagtcaggcagtaggacgctcttcattttactgcctggagtactttccttctcagatgcttcgtaccggaaacaactttaccttcagctacacctttgaggatgttcctttccacagcagctacgctcacagccagagtttggaccgtctcatgaatcctctcatcgaccagtacctgtattacttgagcagaacaaacactccaagcggaaccaccacgcagtccaggcttcagttttctcaggccggagcaagtgacattcgggaccagtctaggaactggcttcctggaccctgttaccgccagcagcgagtatcaaagacagctgcggacaacaacaacagtgaatactcgtggactggagctaccaagtaccacctcaatggcagagactctctggtgaatccgggcccggccatggccagccacaaggacgatgaagaaaagttttttcctcaaagcggggttctcatctttgggaagcaaggctcagagaaaacaaatgtggacattgaaaaggtcatgattacagacgaagaggaaatcagaaccaccaatcccgtggccacggagcagtatggttctgtatctaccaacctccagagcggcaacacacaagcagctactgcagatgtcaacacacaaggcgttcttccaggcatggtctggcaggacagagacgtgcacctgcaggggcctatctgggcaaagattccacacacggacggacattttcacccctctcccctcatgggcggatttggacttaaacaccctcctccacagattctcatcaagaacaccccggtacctgcaaatccttcgaccaccttcagtgcggcaaagtttgcttccttcatcacacagtattccacagggcaggtcagcgtggagatcgagtgggagctgcagaaggagaacagcaaacgctggaaccccgagatccagtacacttccaactacaacaaatctgttaatgtggactttactgtggacactaatggtgtgtattcagagcctcgccccattggcaccagatacctgactcgtaatctgtaa

SEQ ID NO: 2671 - protein, 735 aa, Artificial Sequence
  Synthetic polypeptide
MAADGYLPDWLKDTLSEGIRQWWKLKPGPPPPKPAERHKDDSGGLVLPGYKYLGPFNGLDKGEPVNEADAAALEYDKAYDRQLDSGDNPYLKYNHADAEFQERLKEDTSFGGNLGRAVFQAKKRVLEPLGLVEEPVKTAPGKKRPVEHSPVEPDSSSGTGKAGQQPARKRLNFGQTGDADSVPDPQPLGQPPAAPSGLGTNTMATGSGAPMADNNEGADGVGNSSGSWHCDSTWMGDRVITTSTRTWALPTYNNHLYKQISSQSGASNDNHYFGYSTPWGYFDFNRFHCHFSPRDWQRLINNNWGFRPKRLNFKLFNIQVKEVTQNDGTTTIANNLTSTVQVFTDSEYQLPYVPGSAHQGCLPPFPADVFMVPQYGYLTLNNGSQAVGRSSFYCLEYFPSQMLRTGNNFTFSYTFEDVPFHSSYAHSQSLDRLMNPLIDQYLYYLSRTNTPSGTTTQSRLQFSQAGASDIRDQSRNWLPGPCYRQQRVSKTAADNNNSEYSWTGATKYHLNGRDSLVNPGPAMASHKDDEEKFFPQSGVLIFGKQGSEKTNVDIEKVMITDEEEIRTTNPVATEQYGSVSTNLQSGNTQAATADVNTQGVLPGMVWQDRDVHLQGPIWAKIPHTDGHFHPSPLMGGFGLKHPPPQILIKNTPVPANPSTTFSAAKFASFITQYSTGQVSVEIEWELQKENSKRWNPEIQYTSNYNKSVNVDFTVDTNGVYSEPRPIGTRYLTRNL

SEQ ID NO: 2672 - DNA, 2208 bp, Artificial Sequence
  Synthetic polynucleotide
atggctgccgatggttatcttccagattggctcgaggacactctctctgaaggaataagacagtggtggaagctcaaacctggcccaccaccaccaaagcccgcagagcggcataaggacgacagcaggggtcttgtgcttcctgggtacaagtacctcggacccttcaacggactcgacaagggggagccggtcaacgaggcagacgccgcggccctcgagcacgacaaggcctacgaccggcagctcgacagcggagacaacccgtacctcaagtacaaccacgccgacgcagagtttcaggagcgccttaaagaagatacgtcttttgggggcaacctcggacgagcagtcttccaggcgaaaaagagggttcttgaacctctgggcctggttgaggaacctgttaagacggctccgggaaaaaagaggccggtagagcactctcctgtggagccagactcctcctcgggaaccggaaaagcgggccagcagcctgcaagaaaaagattaaattttggtcagactggagacgcagactccgtacctgacccccagcctctcggacagccaccagcagccccctctggtctgggatctactacaatggctacaggcagtggcgcaccaatggcagacaataacgagggtgccgatggagtgggtaattcctcaggaaattggcattgcgattcccaatggctgggcgacagagtcatcaccaccagcacccgaacctgggccctgcccacatacaacaaccacctctacaagcaaatctccagccaatcaggagccagcaacgacaaccactactttggctacagcaccccctgggggtattttgacttcaacagattccactgccacttttcaccacgtgactggcaaagactcatcaacaacaactggggattccggcccaaaagactcaacttcaagctctttaatattcaagtcaaagaggtcacgcagaatgacggtacgacgacgattgccaataaccttaccagcacggttcaggtgtttactgactcggagtaccagctcccgtacgtcctgggctcggcgcatcaaggatgcctcccgccgtttccagcggacgtcttcatggtcccacagtatggatacctcaccctgaacaacgggagtcaggcggtaggacgctcttccttttactgcctggagtactttccttctcagatgctgcgtactggaaacaactttcagttcagctacacttttgaagacgtgcctttccacagcagctacgctcacagccagagtctggatcggctgatgaatcctctgatcgaccagtacctgtattatctgaacaagacacaaacaaatagtggaactcttcagcagtctcggctactgtttagccaagctggaccaaccaacatgtctcttcaagctaaaaactggctgcctggaccttgctacagacagcagcgtctgtcaaaacaggcaaacgacaacaacaacagcaactttccctggactgcagctacaaagtatcatctaaatggccgggactcgttggttaatccaggaccagctatggccagtcgcaaggatgacgaagaaaagtttttccccatgcatggaaccctgatatttggtaaacaaggaacaaatgccaacgacgcggatttggaaaatgtcatgattacagatgaagaagaaatcagggccaccaatcccgtggctacggagcagtacgggactgtgtcaaataatttgcaaaactcaaacactggtccaactactggaactgtcaatcaccaaggagcgttacctggtatggtgtggcaggatcgagacgtgtacctgcagggacccatttgggccaagattcctcacaccgatggacactttcatccttctccactgatgggaggttttggactcaaacacccgcctcctcagatcatgatcaaaaacactcccgttccagccaatcctcccacaaacttcagttctgccaagtttgcttctttcatcacacagtattccacgggacaggtcagcgtggagatcgagtgggagctgcagaaggagaacagcaaacgctggaatcccgaaattcagtacacttccaactacaacaagtctgttaatgtggactttactgtggacactaatggtgtgtattcagagcctcgccccattggcaccagatacctgactcgtaatctgtaa

SEQ ID NO: 2673 - protein, 735 aa, Artificial Sequence
  Synthetic polypeptide
MAADGYLPDWLEDTLSEGIRQWWKLKPGPPPPKPAERHKDDSRGLVLPGYKYLGPFNGLDKGEPVNEADAAALEHDKAYDRQLDSGDNPYLKYNHADAEFQERLKEDTSFGGNLGRAVFQAKKRVLEPLGLVEEPVKTAPGKKRPVEHSPVEPDSSSGTGKAGQQPARKRLNFGQTGDADSVPDPQPLGQPPAAPSGLGSTTMATGSGAPMADNNEGADGVGNSSGNWHCDSQWLGDRVITTSTRTWALPTYNNHLYKQISSQSGASNDNHYFGYSTPWGYFDFNRFHCHFSPRDWQRLINNNWGFRPKRLNFKLFNIQVKEVTQNDGTTTIANNLTSTVQVFTDSEYQLPYVLGSAHQGCLPPFPADVFMVPQYGYLTLNNGSQAVGRSSFYCLEYFPSQMLRTGNNFQFSYTFEDVPFHSSYAHSQSLDRLMNPLIDQYLYYLNKTQTNSGTLQQSRLLFSQAGPTNMSLQAKNWLPGPCYRQQRLSKQANDNNNSNFPWTAATKYHLNGRDSLVNPGPAMASRKDDEEKFFPMHGTLIFGKQGTNANDADLENVMITDEEEIRATNPVATEQYGTVSNNLQNSNTGPTTGTVNHQGALPGMVWQDRDVYLQGPIWAKIPHTDGHFHPSPLMGGFGLKHPPPQIMIKNTPVPANPPTNFSSAKFASFITQYSTGQVSVEIEWELQKENSKRWNPEIQYTSNYNKSVNVDFTVDTNGVYSEPRPIGTRYLTRNL

SEQ ID NO: 2674 - DNA, 2208 bp, Artificial Sequence
  Synthetic polynucleotide
atggctgccgatggttatcttccagattggctcgaggacactctctctgaaggaataagacagtggtggaagctcaaacctggcccaccaccaccaaagcccgcagagcggcataaggacgacagcaggggtcttgtgcttcctgggtacaagtacctcggacccttcaacggactcgacaagggagagccggtcaacgaggcagacgccgcggccctcgagcacgacaaagcctacgaccggcagctcgacagcggagacaacccgtacctcaagtacaaccacgccgacgcggagtttcaggagcgccttaaagaagatacgtcttttgggggcaacctcggacgagcagtcttccaggcgaaaaagagggttcttgaacctctgggcctggttggggaacctgtcaagacggctccaggaaaaaagaggccggtagagcactctcctgtggagccagactcctcctcgggaaccggaaaggcgggccagcagcctgcaagaaaaagattgaattttggtcagactggagacgcagactcagtacctgacccccagcctctcggacagccaccagcagccccctctggtctgggaactaatacgatggctacaggcagtggcgcaccaatggcagacaataacgagggcgccgacggagtgggtaattcctcgggaaattggcattgcgattccacatggatgggcgacagagtcatcaccaccagcacccgaacctgggccctgcccacctacaacaaccacctctacaaacaaatttccagccaatcaggagcctcgaacgacaatcactactttggctacagcaccccttgggggtattttgacttcaacagattccactgccacttttcaccacgtgactggcaaagactcatcaacaacaactggggattccgacccaagagactcaacttcaagctctttaacattcaagtcaaagaggtcacgcagaatgacggtacgacgacgattgccaataaccttaccagcacggttcaggtgtttactgactcggagtaccagctcccgtacgtcctcggctcggcgcatcaaggatgcctcccgccgttcccagcagacgtcttcatggtgccacagtatggatacctcaccctgaacaacgggagtcaggcagtaggacgctcttcattttactgcctggagtactttccttctcagatgctgcgtaccggaaacaactttaccttcagctacacttttgaggacgttcctttccacagcggctacgctcacagccagagtctggaccgtctcatgaatcctctcatcgaccagtacctgtattacttgagcacaacaaacactccaagtggaaccaccacgcagtcaaggcttcagttttctcaggccggagcgagtgacattcgggaccagtctaggaactggcttcctggaccctgttaccgccagcagcgagtatcaaagacatctgcggataacaacaacagtgaatactcgtggactggagctaccaagtaccacctcaatggcagagactctctggtgaatccgggcccggccatggcaagccacaaggacaatgaagaaaagttttttcctcagagcggggttctcatctttgggaagcaaggctcagagaaaacaaatgtggacattgaaaaggtcatgattacagacgaagaggaaatcaggacaaccaatcccgtggctacggagcagtacggttctgtatctaccaacctccagagaggcaacagacaagcagctaccgcagatgtcaacacacaaggcgttcttccaggcatggtctggcaggacagagatgtgtaccttcaggggcccatctgggcaaagattccacacacggacggacattttcacccctctcccctcatgggtggattcggacttaaacaccctcctccacagattctcatcaagaacaccccggtacctgcgaatccttcgaccaccttcagtgcggcaaagtttgcttccttcatcacacagtactccacgggacaggtcagcgtggagatcgagtgggagctgcagaaggaaaacagcaaacgctggaatcccgaaattcagtacacttccaactacaacaagtctgttaatgtggactttactgtggacactaatggcgtgtattcagagcctcgccccattggcaccagatacctgactcgtaatctgtaa

SEQ ID NO: 2675 - protein, 735 aa, Artificial Sequence
  Synthetic polypeptide
MAADGYLPDWLEDTLSEGIRQWWKLKPGPPPPKPAERHKDDSRGLVLPGYKYLGPFNGLDKGEPVNEADAAALEHDKAYDRQLDSGDNPYLKYNHADAEFQERLKEDTSFGGNLGRAVFQAKKRVLEPLGLVGEPVKTAPGKKRPVEHSPVEPDSSSGTGKAGQQPARKRLNFGQTGDADSVPDPQPLGQPPAAPSGLGTNTMATGSGAPMADNNEGADGVGNSSGNWHCDSTWMGDRVITTSTRTWALPTYNNHLYKQISSQSGASNDNHYFGYSTPWGYFDFNRFHCHFSPRDWQRLINNNWGFRPKRLNFKLFNIQVKEVTQNDGTTTIANNLTSTVQVFTDSEYQLPYVLGSAHQGCLPPFPADVFMVPQYGYLTLNNGSQAVGRSSFYCLEYFPSQMLRTGNNFTFSYTFEDVPFHSGYAHSQSLDRLMNPLIDQYLYYLSTTNTPSGTTTQSRLQFSQAGASDIRDQSRNWLPGPCYRQQRVSKTSADNNNSEYSWTGATKYHLNGRDSLVNPGPAMASHKDNEEKFFPQSGVLIFGKQGSEKTNVDIEKVMITDEEEIRTTNPVATEQYGSVSTNLQRGNRQAATADVNTQGVLPGMVWQDRDVYLQGPIWAKIPHTDGHFHPSPLMGGFGLKHPPPQILIKNTPVPANPSTTFSAAKFASFITQYSTGQVSVEIEWELQKENSKRWNPEIQYTSNYNKSVNVDFTVDTNGVYSEPRPIGTRYLTRNL

SEQ ID NO: 2676 - DNA, 2208 bp, Artificial Sequence
  Synthetic polynucleotide
atggctgccgatggttatcttccagattggctcgaggacactctctctgaaggaataagacagtggtggaagctcaaacctggcccaccaccaccaaagcccgcagagcggcataaggacgacagcaggggtcttgtgcttcctgggtacaagtacctcggacccttcaacggactcgacaagggagagccggtcaacgaggcagacgccgcggccctcgagcacgacaaagcctacgaccggcagctcgacagcggagacaacccgtacctcaagtacaaccacgccgacgcggagtttcaggagcgccttaaagaagatacgtcttttgggggcaacctcggacgagcagtcttccaggcgaaaaagagggttcttgaacctctgggcctggttggggaacctgttaagacggctccgggaaaaaagaggccggtagagcactctcctgtggagccagactcctcctcgggaaccggaaaggcgggccagcagcctgcaagaaaaagattgaattttggtcagactggagacgcagactcagtacctgacccccagcctctcggacagccaccagcagccccctctggtctgggaactaatacgatggctacaggcagtggcgcaccaatggcagacaataacgagggcgccgacggagtgggtaattcctcgggaaatcggcattgcgattccacatggatgggcgacagagtcatcaccaccagcacccgaacctgggccctgcccacctacaacaaccacctctacagacaaatttccagccaatcaggagcctcgaacgacaatcactactttggctacagcaccccttgggggtattttgacttcaacagattccactgccacttttcaccacgtgactggcaaagactcatcaacaacaactggggattccgacccaagagactcaacttcaagctctttaacattcaagtcaaagaggtcacgcagaatgacggtacgacgacgattgccaataaccttaccagcacggttcaggtgtttactgactcggagtaccagctcccgtacgtcctcggctcggcgcatcaaggatgcctcccgccgttcccagcagacgtcttcatggtgccacagtatggatacctcaccctgagcaacgggagtcaggcagtaggacgctcttcattttactgcccggagtactttccttctcagatgctgcgtaccggaaacaactttaccttcagctacacttttgaggacgttcctttccacagcagctacgctcacagccagagtctggaccgtctcatgaatcctctcatcgaccagtacctgtattacttgagcacaacaaacactccaagtggaaccaccacgcagtcaaggcttcagttttctcaggccggagcgagtgacattcgggaccagtctaggaactggcttcctggaccctgttaccgccagcagcgagtatcaaagacatctgcggataacaacaacagtgaatactcgtggactggagctaccaagtaccacctcaatggcagagactctctggtgaatccgggcccggccatggcaagccacaaggacaatgaagaaaagttttttcctcagagcggggttctcatctttgggaagcaaggctcagagaaaacaaatgtggacattgaaaaggtcatgattacagacgaagaggaaatcaggacaaccaatcccgtggctacggagcagtatggttctgtatctaccaacctccagagaggcaacagacaagcagctaccgcagatgtcaacacacaaggcgttcttccaggcatggtctggcaggacagagatgtgtaccttcaggggcccatctgggcaaagattccacacacggacggacattttcacccctctcccctcatgggtggattcggacctaaacaccctcctccacagattctcatcaagaacaccccggtacctgcgaatccttcgaccaccttcagtgcggcaaagtttgcttccttcatcacacagtactccacgggacaggtcagcgtggagatcgagtgggagctgcagaaggaaaacagcaaacgctggaatcccgaaattcagtacacttccaactacaacaagtctgttaatgtggactttactgtggacactaatggcgtgtattcagagcctcgccccattggcaccagatacctgactcgtaatttgtaa

SEQ ID NO: 2677 - protein, 735 aa, Artificial Sequence
  Synthetic polypeptide
MAADGYLPDWLEDTLSEGIRQWWKLKPGPPPPKPAERHKDDSRGLVLPGYKYLGPFNGLDKGEPVNEADAAALEHDKAYDRQLDSGDNPYLKYNHADAEFQERLKEDTSFGGNLGRAVFQAKKRVLEPLGLVGEPVKTAPGKKRPVEHSPVEPDSSSGTGKAGQQPARKRLNFGQTGDADSVPDPQPLGQPPAAPSGLGTNTMATGSGAPMADNNEGADGVGNSSGNRHCDSTWMGDRVITTSTRTWALPTYNNHLYRQISSQSGASNDNHYFGYSTPWGYFDFNRFHCHFSPRDWQRLINNNWGFRPKRLNFKLFNIQVKEVTQNDGTTTIANNLTSTVQVFTDSEYQLPYVLGSAHQGCLPPFPADVFMVPQYGYLTLSNGSQAVGRSSFYCPEYFPSQMLRTGNNFTFSYTFEDVPFHSSYAHSQSLDRLMNPLIDQYLYYLSTTNTPSGTTTQSRLQFSQAGASDIRDQSRNWLPGPCYRQQRVSKTSADNNNSEYSWTGATKYHLNGRDSLVNPGPAMASHKDNEEKFFPQSGVLIFGKQGSEKTNVDIEKVMITDEEEIRTTNPVATEQYGSVSTNLQRGNRQAATADVNTQGVLPGMVWQDRDVYLQGPIWAKIPHTDGHFHPSPLMGGFGPKHPPPQILIKNTPVPANPSTTFSAAKFASFITQYSTGQVSVEIEWELQKENSKRWNPEIQYTSNYNKSVNVDFTVDTNGVYSEPRPIGTRYLTRNL

SEQ ID NO: 2678 - DNA, 2205 bp, Artificial Sequence
  Synthetic polynucleotide
atggctgccgatggttatcttccagattggctcgaggacactctctctgaaggaataagacagtggtggaagctcaaacctggcccaccaccaccaaagcccgcagagcggcataaggacgacagcaggggtcttgtgcttcctgggtacaagtacctcggacccttcaacggactcgacaagggagagccggtcaacgaggcagacgccgcggccctcgagcacgacaaggcctacgaccggcagctcgacagcggagacaacccgtacctcaagtacaaccacgccgacgcggagtttcaggagcgtcttaaagaagatacgtcttttgggggcaacctcggacgagcagtcttccaggcgaaaaagagggttcttgaacctctgggcctggttgaggaacctgttaagacggctccgggaaaaaagaggccggtagagcactctcctgcggagccagactcctcctcgggaaccggaaaagcgggccagcagcctgcaagaaaaagactgaatttcggtcagactggagacgcagactccgtacctgacccccagcctctcagacagccaccagcagcccccacaagtttgggatctactacaatggctacaggcagtggcgcaccaatggcagacaataacgagggtgccgatggagtgggtaattcctcaggaaattggcattgcgattcccaatggctgggcgacagagtcatcaccaccagcacccgaacctgggccctgcccacctacaacaaccacctttacaagcaaatctccagccaatcaggagcctcaaacgacaaccactactttggctacagcaccccctgggggtattttgacttcaacagattccactgccacttttcaccacgtgactggcaaagactcatcaacaacaactggggattccgacccaagagactcaacttcaagctctttaacattcaagtcaaagaggtcacgcagaatgacggtacgacgacgattgccaataaccttaccagcacggttcaggtgtttactgactcggagtaccagctcccgtacgtcctcggctcggcgcatcaaggatgcctcccgccgtttccagcggacgtcttcatggtcccacagtatggatacctcaccctgaacaacgggagtcaggcggtaggacgctcttccttttactgcctggagtactttccttctcagatgctgcgtactggaaacaactttcagttcagctacacttttgaagacgtgcctttccacagcagctacgctcacagccagagtttggatcggctgatgaatcctctgatcgaccagtacctgtattatctaaacagaacacaaacagctagtggaactcagcagtctcggctactgtttagccaagctggacccacaagcatgtctcttcaagctaaaaactggctgcctggaccgtgttatcgccagcagcgtttgtcaaagcaggcaaacgacaacaacaacagcaactttccctggactggagctaccaagtactacctcaatggcagagactctttggtgaacccgggcccggccatggccagccacaaggacgatgaagaaaagtttttccccatgcatggaaccctaatatttggtaaagaaggaacaaatgctaccaacgcggaattggaaaatgtcatgattacagatgaagaggaaatcaggaccaccaatcccgtggctacagagcagtacggatatgtgtcaaataatttgcaaaactcaaatactgctgcaagtactgaaactgtgaatcaccaaggagcattacctggtatggtgtggcaggatcgagacgtgtacctgcagggacccatttgggccaagattcctcacaccgatggacactttcatccttctccactgatgggaggttttggactcaaacacccgcctcctcagattatgatcaaaaacactcccgttccagccaatcctcccacaaacttcagttctgccaagtttgcttccttcatcacacagtattccacgggacaggtcagcgtggagatcgagtgggagctgcagaaggagaacagcaaacgctggaatcccgaaattcagtacacttccaactacaacaaatctgttaatgtggactttactgtggacactaatggtgtgtattcagagcctcgccccattggcaccagatacctgactcgtaatctgtaa

SEQ ID NO: 2679 - protein, 734 aa, Artificial Sequence
  Synthetic polypeptide
MAADGYLPDWLEDTLSEGIRQWWKLKPGPPPPKPAERHKDDSRGLVLPGYKYLGPFNGLDKGEPVNEADAAALEHDKAYDRQLDSGDNPYLKYNHADAEFQERLKEDTSFGGNLGRAVFQAKKRVLEPLGLVEEPVKTAPGKKRPVEHSPAEPDSSSGTGKAGQQPARKRLNFGQTGDADSVPDPQPLRQPPAAPTSLGSTTMATGSGAPMADNNEGADGVGNSSGNWHCDSQWLGDRVITTSTRTWALPTYNNHLYKQISSQSGASNDNHYFGYSTPWGYFDFNRFHCHFSPRDWQRLINNNWGFRPKRLNFKLFNIQVKEVTQNDGTTTIANNLTSTVQVFTDSEYQLPYVLGSAHQGCLPPFPADVFMVPQYGYLTLNNGSQAVGRSSFYCLEYFPSQMLRTGNNFQFSYTFEDVPFHSSYAHSQSLDRLMNPLIDQYLYYLNRTQTASGTQQSRLLFSQAGPTSMSLQAKNWLPGPCYRQQRLSKQANDNNNSNFPWTGATKYYLNGRDSLVNPGPAMASHKDDEEKFFPMHGTLIFGKEGTNATNAELENVMITDEEEIRTTNPVATEQYGYVSNNLQNSNTAASTETVNHQGALPGMVWQDRDVYLQGPIWAKIPHTDGHFHPSPLMGGFGLKHPPPQIMIKNTPVPANPPTNFSSAKFASFITQYSTGQVSVEIEWELQKENSKRWNPEIQYTSNYNKSVNVDFTVDTNGVYSEPRPIGTRYLTRNL

SEQ ID NO: 2680 - DNA, 3160 bp, Artificial Sequence
  Synthetic polynucleotide
acccttcactaaagggactagtcctgcaggtttaaacgaattcgcccttgctgcgtcaactggaccaatgagaactttcccttcaacgactgtgtcgacaagatggtgatttggtgggaggaggggaagatgaccgccaaggtcgtggagtcggccaaagccattctcggaggaagcaaggtgcgcgtggaccagaaatgcaagtcctcggcccagatagatccgactcccgtgatcgtcacctccaacaccaacatgtgcgccgtgattgacgggaactcaacgaccttcgaacaccagcagccgttgcaagaccggatgttcaaatttgaactcacccgccgtctggatcatgactttgggaaggtcaccaagcgggaagtcaaagactttttccggtgggcaaaggatcacgtggttgaggtggagcatgaattctacgtcaaaaagggtggagccaagaaaagacccgcccctagtgacgcagatataagtgagcccaaacgggtgcgcgagtcagttgcgcagccatcgacgtcagacgcggaagcttcgatcaactacgcggacaggtaccaaaacaaatgttctcgtcacgtgggcatgaatctgatgctgtttccctgcagacaatgcgagagaatgaatcaaaattcaaatatctgcttcactcacggacagaaagactgtttagagtgctttcccgtgtcagaatctcaacctgtttctgtcgtcaaaaaggcgtatcagaaactgtgctacattcatcatatcatgggaaaggtgccagacgcttgcactgcctgcgatctggtcaatgtggatttggatgactgcatctctgaacaataaatgatttaaatcaggtatggctgccgatggttatcttccagattggctcgaggacactctctctgaaggaataagacagtggtggaagctcaaacctggcccaccaccaccaaagcccgcagagcggcataaggacgacagcaggggtcttgtgcttcctgggtacaagtacctcggacccttcaacggactcgacaagggagagccggtcaacgaggcagacgccgcggccctcgagcacgacaaggcctacgaccggcagctcgacagcggagacaacccgtacctcaagtacaaccacgccgacgcggagtttcaggagcgtcttaaagaagatacgtcttttgggggcaacctcggacgagcagtcttccaggcgaaaaagagggttcttgaacctctgggcctggttgaggaacctgttaagacggctccgggaaaaaagaggccggtagagcactctcctgcggagccagactcctcctcgggaaccggaaaagcgggccagcagcctgcaagaaaaagactgaatttcggtcagactggagacgcagactccgtacctgacccccagcctctcagacagccaccagcagcccccacaagtttgggatctactacaatggctacaggcagtggcgcaccaatggcagacaataacgagggtgccgatggagtgggtaattcctcaggaaattggcattgcgattcccaatggctgggcgacagagtcatcaccaccagcacccgaacctgggccctgcccacctacaacaaccacctttacaagcaaatctccagccaatcaggagcctcaaacgacaaccactactttggctacagcaccccctgggggtattttgacttcaacagattccactgccacttttcaccacgtgactggcaaagactcatcaacaacaactggggattccgacccaagagactcaacttcaagctctttaacattcaagtcaaagaggtcacgcagaatgacggtacgacgacgattgccaataaccttaccagcacggttcaggtgtttactgactcggagtaccagctcccgtacgtcctcggctcggcgcatcaaggatgcctcccgccgtttccagcggacgtcttcatggtcccacagtatggatacctcaccctgaacaacgggagtcaggcggtaggacgctcttccttttactgcctggagtactttccttctcagatgctgcgtactggaaacaactttcagttcagctacacttttgaagacgtgcctttccacagcagctacgctcacagccagagtttggatcggctgatgaatcctctgatcgaccagtacctgtattatctaaacagaacacaaacagctagtggaactcagcagtctcggctactgtttagccaagctggacccacaagcatgtctcttcaagctaaaaactggctgcctggaccgtgttatcgccagcagcgtttgtcaaagcaggcaaacgacaacaacaacagcaactttccctggactggagctaccaagtactacctcaatggcagagactctttggtgaacccgggcccggccatggccagccacaaggacgatgaagaaaagtttttccccatgcatggaaccctaatatttggtaaagaaggaacaaatgctaccaacgcggaattggaaaatgtcatgattacagatgaagaggaaatcaggaccaccaatcccgtggctacagagcagtacggatatgtgtcaaataatttgcaaaactcaaatactgctgcaagtactgaaactgtgaatcaccaaggagcattacctggtatggtgtggcaggatcgagacgtgtacctgcagggacccatttgggccaagattcctcacaccgatggacactttcatccttctccactgatgggaggttttggactcaaacacccgcctcctcagattatgatcaaaaacactcccgttccagccaatcctcccacaaacttcagttctgccaagtttgcttccttcatcacacagtattccacgggacaggtcagcgtggagatcgagtgggagctgcagaaggagaacagcaaacgctggaatcccgaaattcagtacacttccaactacaacaaatctgttaatgtggactttactgtggacactaatggtgtgtattcagagcctcgccccattggcaccagatacctgactcgtaatctgtaattgcttgttaatcaataaaccgtttaattcgtttcagttgaactttggtctctgcgaagggcgaattcgcggccgctaaatcaatcg

SEQ ID NO: 2681 - protein, 734 aa, Artificial Sequence
  Synthetic polypeptide
MAADGYLPDWLEDTLSEGIRQWWKLKPGPPPPKPAERHKDDSRGLVLPGYKYLGPFNGLDKGEPVNEADAAALEHDKAYDRQLDSGDNPYLKYNHADAEFQERLKEDTSFGGNLGRAVFQAKKRVLEPLGLVEEPVKTAPGKKRPVEHSPAEPDSSSGTGKAGQQPARKRLNFGQTGDADSVPDPQPLGQPPAAPTSLGSTTMATGSGAPMADNNEGADGVGNSSGNWHCDSQWLGDRVITTSTRTWALPTYNNHLYKQISSQSGASNDNHYFGYSTPWGYFDFNRFHCRFSPRDWQRLINNNWGFRPKRLNFKLFNIQVKEVTQNDGTTTIANNLTSTVQVFTDSEYQLPYVLGSAHQGCLPPFPADVFMVPQYGYLTLNNGSQAVGRSSFYCLEYFPSQMLRTGNNFQFSYTFEDVPFHSSYAHSQGLDRLMNPLIDQYLYYLNRTQTASGTQQSRLLFSQAGPTSMSLQAKNWLPGPCYRQQRLSKQANDNNNSNFPWTGATKYHLNGGDSLVNPGPAMASHKDDEEKFFPMHGTLIFGKEGTNATNAELENVMITDEEEIRTTNPVATEQYGYVSNNLQNSNTAASTETVNHQGALPGMVWQDRDVYLRGPIWAKIPHADGHFHPSPLMGGFGLKHPPPQIMIKNTPVPANPPTNFSSAKFASFITQYSTGQVSVEIEWELQKENSKRWNPEIQYTSNYNKSVNVDFTVDTNGVYSEPRPIGTRYLTRNL

SEQ ID NO: 2682 - DNA, 3157 bp, Artificial Sequence
  Synthetic polynucleotide
ctcactaagggactagtcctgcaggtttaaacgaattcgcccttgctgcgtcaactggaccaatgagaactttcccttcaacgactgtgtcgacaagatggtgatttggtgggaggaggggaagatgaccgccaaggtcgtggagtcggccaaagccactctcggaggaagcaaggtgcgcgtggaccagaaacgcaagtcctcggcccagatagatccgactcccgtgatcgtcacctccaacaccaacatgtgcgccgtgattgacgggaactcaacgaccttcgaacaccagcagccgttgcaagaccgaatgttcaaatttgaactcacccgccgtctggatcatgacttcgggaaggtcaccaagcaggaagtcaaagactttttccggtgggcaaaggatcacgtggttgaggtggagcatgaattctacgtcaaaaagggtggagccaagaaaagacccgcccctagtgacgcagatataagtgagcccaaacgggtgcgcgagtcagttgcgcagccatcgacgtcagacgcggaagcttcgatcaactacgcggacaggtaccaaaacaaatgttctcgtcacgtgggcatgaatctgatgctgtttccctgcagacaatgcgagagaatgaatcaaaattcaaatatctgcttcactcacggacagaaagactgtttagagtgctttcccgtgtcagaatctcaacctgtttctgtcgtcaaaaaggcgtatcagaaactgtgctacattcatcatatcatgggaaaggtgccagacgcttgcactgcctgcgatctggtcaatgtggatttggatgactgcatctctgaacaataaatgatttaaatcaggtatggctgccgatggttatcttccagattggctcgaggacactctctctgaaggaataagacagtggtggaagctcaaacctggcccaccaccaccaaagcccgcagagcggcataaggacgacagcaggggtcttgtgcttcctgggtacaagtacctcggacccttcaacggactcgacaagggagagccggtcaacgaggcagacgccgcggctctcgagcacgacaaggcctacgaccggcagctcgacagcggagacaacccgtacctcaagtacaaccacgccgacgcggagtttcaggagcgtcttaaagaagatacgtcttttgggggcaacctcggacgagcagtcttccaggcgaaaaagagggttcttgaacctctgggcctggttgaggaacctgttaagacggctccgggaaaaaagaggccggtagagcactctcctgcggagccagactcctcctcgggaaccggaaaagcgggccagcagcctgcaagaaaaagactgaatttcggtcagactggagacgcagactccgtacctgacccccagcctctcggacagccaccagcagcccccacaagtttgggatctactacaatggctacaggcagtggcgcaccaatggcagacaataacgagggtgccgatggagtgggtaattcctcaggaaattggcattgcgattcccaatggctgggcgacagagtcatcaccaccagcacccgaacctgggccctgcccacctacaacaaccacctttacaagcaaatctccagccaatcaggagcctcaaacgacaaccactactttggctacagcaccccctgggggtattttgacttcaacagattccactgccgcttttcaccacgtgactggcaaagactcatcaacaacaactggggattccgacccaagagactcaacttcaagctctttaacattcaagtcaaagaggtcacgcagaatgacggtacgacgacgattgccaataaccttaccagcacggttcaggtgtttactgactcggagtaccagctcccgtacgtcctcggctcggcgcatcaaggatgcctcccgccgtttccagcggacgtcttcatggtcccacagtatggatacctcaccctgaacaacgggagtcaggcggtaggacgctcttccttttactgcctggagtactttccttctcagatgctgcgtactggaaacaactttcagttcagctacacttttgaagacgtgcctttccacagcagctacgctcacagccagggtttggatcggctgatgaatcctctgatcgaccagtacctgtattatctaaacagaacacaaacagctagtggaactcagcagtctcggctactgtttagccaagctggacccacaagcatgtctcttcaagctaaaaactggctgcctggaccgtgttatcgccagcagcgtttgtcaaagcaggcaaacgacaacaacaacagcaactttccctggactggagctaccaagtaccacctcaatggcggagactctttggtgaacccgggcccggccatggccagccacaaggacgatgaagaaaagtttttccccatgcatggaaccctaatatttggtaaagaaggaacaaatgctaccaacgcggaattggaaaatgtcatgattacagatgaagaggaaatcaggaccaccaatcccgtggctacagagcagtacggatatgtgtcaaataatttgcaaaactcaaatactgctgcaagtactgaaactgtgaatcaccaaggagcattacctggtatggtgtggcaggatcgagacgtgtacctgcggggacccatttgggccaagattcctcacgccgatggacactttcatccttctccactgatgggaggttttggactcaaacacccgcctcctcagattatgatcaaaaacactcccgttccagccaatcctcccacaaacttcagttctgccaagtttgcttccttcatcacacagtattccacgggacaggtcagcgtggagatcgagtgggagctgcagaaggagaacagcaaacgctggaatcccgaaattcagtacacttccaactacaacaaatctgttaatgtggactttactgtggacactaatggtgtgtattcagagcctcgccccattggcaccagatacctgactcgtaatctgtaattgcttgttaatcaataaaccgtttaattcgtttcagttgaactttggtctctgcgaagggcgaattcgcggccgctaaattcaattcg

SEQ ID NO: 2683 - protein, 734 aa, Artificial Sequence
  Synthetic polypeptide
MAADGYLPDWLEDTLSEGIRQWWKLKPGPPPPKPAERHKDDSRGLVLPGYKYLGPFNGLDKGEPVNEADAAALEHDKAYDRQLDSGDNPYLKYNHADAEFQERLKEDTSFGGNLGRAVFQAKKRVLEPLGLVEEPVKTAPGKKRPVEHSPAEPDSSSGTGKAGQQPARKRLNFGQTGDADSVPDPQPLGQPPAAPTSLGSTTMATGSGAPMADNNEGADGVGNSSGNWHCDSQWLGDRVITTSTRTWALPTYNNHLYKQISSQSGASNDNHYFGYSTPWGYFDFNRFHCHFSPRDWQRLINNNWGFRPKRLNFKLFNIQVKEVTQNDGTTTIANNLTSTVQVFTDSEYQLPYVLGSAHQGCLPPFPADVFMVPQYGYLTLNNGSQAVGRSSFYCLECFPSQMLRTGNNFQFSYTFEDVPFHSSYAHSQSLDRLMNPLIDQYLYYLNRTQTASGTQQSRLLFSQAGPTSMSLQAKNWLPGPCYRQQRLSKQANDNNNSNFPWTGATKYHLNGRDSLVNPGPAMASHKDDEEKFFPMHGTLIFGKEGTNATNAELENVMITDEEEIRTTNPVATEQYGYVSNNLQNSNTAASTETVNHQGALPGMVWQDRDVYLQGPIWAKIPHTDGHFHPSPLMGGFGLKHPPPQIMIKNTPVPANPPTNFSSAKFASFITQYSTGQVSVEIEWELQKENSKRWNPEIQYTSNYNKSVNVDFTVDTNGVYSEPRPIGTRYLTRNL

SEQ ID NO: 2684 - DNA, 2208 bp, Artificial Sequence
  Synthetic polynucleotide
atggctgccgatggttatcttccagattggctcgaggacactctctctgaaggaataagacagtggtggaagctcaaacctggcccaccaccaccaaagcccgcagagcggcataaggacgacagcaggggtcttgtgcttcctggatacaagtacctcggacccttcaacggactcgacaagggagagccggtcaacgaggcagacgccgcggccctcgagcacgacaaggcctacgaccggcagctcgacagcggagacaacccgtacctcaagtacaaccacgccgacgcggagtttcaggagcgccttaaagaagatacgtcttttgggggcaacctcggacgagcagtcttccaggcgaaaaagagggttcttgaacctctgggcctggttgaggaacctgttaagacggctccgggaaaaaagaggccggtagagcactctcctgtggagccagactcctcctcgggaaccggaaaagcgggcaaccagcctgcaagaaaaagattgaatttcggtcagactggagacgcagactccgtacctgacccccagcctctcggacagccaccagcatccccctctggtctgggaactaatacgatggctacaggcagtggcgcaccaatggcagacaataacgagggcgccgacggagtgggtaattcctcgggaaattggcattgcgattccacatggatgggcgacagagtcgtcaccaccagcacccgcacctgggccctgcccacctacaacaaccacctctacaagcagatttccagccaatcaggagccagcaacgacaaccactactttggctacagcaccccttgggggtattttgacttcaacagattccactgccacttttcgccacgcgactggcagagactcatcaacaacaactggggattccggcccaaaagactcaacttcaagctgtttaacattcaagtcaaggaggtcacgcagaatgacggtacgacgacgattgccaataaccttaccagcacggttcaggtgtttactgacttggagtaccagctcccgtacgtcctcggctcggcgcatcaaggatgcctcccgccgttcccagcagacgtcttcatggtgccacagtatggatacctcaccctgaacaacgggagtcaggcggtaggacgctcttccttttactgcctggagtactttccttctcagatgcttcgcaccggaaacaactttaccttcagctacacttttgaagacgttcctttccacagcagctacgctcacagtcaaagtctggaccgtctcatgaatcctctcatcgaccagtacctgtattacttgagcagaacaaacactccaagcggaaccactacgcagtccaggcttcagttttctcaggccggagcgagtgacattcgggaccagtctaggaactggcttcctggaccctgttaccgccagcagcgagtatcaaagacagctgcggataacaacaacagtgaatactcgtggactggagctaccaagtaccacctcaatggcagagactctctggtgaatccgggcccggccatggccagccacaaggacgatgaagaaaagttttttcctcaaagcggggttctcatctttgggaagcaaggctcagagaaaacaaatgtggacattgaaaaggtcatgattacagacgaagaggaaatcaggaccaccaatcccgtggctacggagcagtatggttctgtatctaccaacctccagagcggcaacacacaagcagctacctcagatgtcaacacacaaggcgttcttccaggcatggtctggcaggacagagacgtgtacctgcaggggcccatctgggcaaaaattccacacacggacggacattttcacccctctcccctcatgggcggatttggacttaaacaccctcctccacagattctcattaagaataccccggtacctgcgaatccttcgaccaccttcagcgcggcaaagtttgcttccttcatcacacagtattccacggggcaggtcagcgtggagatcgagtgggagctgcagaaggagaacagcaaacgctggaatcccgaaattcagtacacttccaactacaacaaatctgttaatgtggactttactgtggacactaatggggtgtattcagagcctcgccctattggcaccagatacctgactcgtaatctgtaa

SEQ ID NO: 2685 - DNA, 3159 bp, Artificial Sequence
  Synthetic polynucleotide
gattgatttagcggccgcgaattcgcccttgctgcgtcaactggaccaatgagaactttcccttcaacgattgcgtcgacaagatggtgatctggtgggaggagggaaagatgaccgccaaggtcgtggagtcggccaaagccattctcggaggaagcaaggtgcgtgtggaccaaaagtgcaagtcttcggcccagatcgacccgactcccgtgatcgtcacctccaacaccaacatgtgcgccgtgattgatggaaactcaacgaccttcgagcaccagcagccgttgcaagaccggatgttcaaatttgaacttacccgccgtctggatcatgactttggaaaggtcaccaagcaggaagtgaaagactttttccggtgggcaaaggatcacgtggttgaggtggagcatgagttctacgtcaaaaagggtggagccaaaaaaagacccgcccccagtgacgcagatataagtgagcccaaacgggcgcgcgagtcagttgcgcagccatcgacgtcagacgcggaagcttcgatcaactacgcggacaggtaccaaaacaaatgttctcgtcacgtgggcatgaatctgatgctgtttccctgcagacaatgcgagagaatgaatcagaattcaaatatctgcttcactcacggacagaaagactgtccatagtgctttcccgtgtcagaatctcaacccgtttctgtcgtcaaaaaggcgtatcagaaactgtgctacattcatcacatcatgggaaaggtgccagacgcttgcactgcttgcgacctggtcaatgtggatttggatgactgcatctctgaacaataaatgatttaaatcaggtatggctgccgatggttatcttccagattggctcgaggacactctctctgaaggaataagacagtggtggaagctcaaacctggcccaccaccaccaaagcccgcagagcggcataaggacgacagcaggggtcttgtgcttcctggatacaagtacctcggacccttcaacggactcgacaagggagagccggtcaacgaggcagacgccgcggccctcgagcacgacaaggcctacgaccggcagctcgacagcggagacaacccgtacctcaagtacaaccacgccgacgcggagtttcaggagcgccttaaagaagatacgtcttttgggggcaacctcggacgagcagtcttccaggcgaaaaagagggttcttgaacctctgggcctggttgaggaacctgttaagacggctccgggaaaaaagaggccggtagagcactctcctgtggagccagactcctcctcgggaaccggaaaagcgggcaaccagcctgcaagaaaaagattgaatttcggtcagactggagacgcagactccgtacctgacccccagcctctcggacagccaccagcatccccctctggtctgggaactaatacgatggctacaggcagtggcgcaccaatggcagacaataacgagggcgccgacggagtgggtaattcctcgggaaattggcattgcgattccacatggatgggcgacagagtcgtcaccaccagcacccgcacctgggccctgcccacctacaacaaccacctctacaagcagatttccagccaatcaggagccagcaacgacaaccactactttggctacagcaccccttgggggtattttgacttcaacagattccactgccacttttcgccacgcgactggcagagactcatcaacaacaactggggattccggcccaaaagactcaacttcaagctgtttaacattcaagtcaaggaggtcacgcagaatgacggtacgacgacgattgccaataaccttaccagcacggttcaggtgtttactgacttggagtaccagctcccgtacgtcctcggctcggcgcatcaaggatgcctcccgccgttcccagcagacgtcttcatggtgccacagtatggatacctcaccctgaacaacgggagtcaggcggtaggacgctcttccttttactgcctggagtactttccttctcagatgcttcgcaccggaaacaactttaccttcagctacacttttgaagacgttcctttccacagcagctacgctcacagtcaaagtctggaccgtctcatgaatcctctcatcgaccagtacctgtattacttgagcagaacaaacactccaagcggaaccactacgcagtccaggcttcagttttctcaggccggagcgagtgacattcgggaccagtctaggaactggcttcctggaccctgttaccgccagcagcgagtatcaaagacagctgcggataacaacaacagtgaatactcgtggactggagctaccaagtaccacctcaatggcagagactctctggtgaatccgggcccggccatggccagccacaaggacgatgaagaaaagttttttcctcaaagcggggttctcatctttgggaagcaaggctcagagaaaacaaatgtggacattgaaaaggtcatgattacagacgaagaggaaatcaggaccaccaatcccgtggctacggagcagtatggttctgtatctaccaacctccagagcggcaacacacaagcagctacctcagatgtcaacacacaaggcgttcttccaggcatggtctggcaggacagagacgtgtacctgcaggggcccatctgggcaaaaattccacacacggacggacattttcacccctctcccctcatgggcggatttggacttaaacaccctcctccacagattctcattaagaataccccggtacctgcgaatccttcgaccaccttcagcgcggcaaagtttgcttccttcatcacacagtattccacggggcaggtcagcgtggagatcgagtgggagctgcagaaggagaacagcaaacgctggaatcccgaaattcagtacacttccaactacaacaaatctgttaatgtggactttactgtggacactaatggggtgtattcagagcctcgccctattggcaccagatacctgactcgtaatctgtaattgcttgttaatcaataaaccgtttaattcgtttcagttgaactttggtctctgcgaagggcgaattcgtttaaacctgcaggactagtccctttagtgagg

SEQ ID NO: 2686 - protein, 735 aa, Artificial Sequence
  Synthetic polypeptide
MAADGYLPDWLEDTLSEGIRQWWKLKPGPPPPKPAERHKDDSRGLVLPGYKYLGPFNGLDKGEPVNEADAAALEHDKAYDRQLDSGDNPYLKYNHADAEFQERLKEDTSFGGNLGRAVFQAKKRVLEPLGLVEEPVKTAPGKKRPVEHSPVEPDSSSGTGKAGNQPARKRLNFGQTGDADSVPDPQPLGQPPASPSGLGTNTMATGSGAPMADNNEGADGVGNSSGNWHCDSTWMGDRVVTTSTRTWALPTYNNHLYKQISSQSGASNDNHYFGYSTPWGYFDFNRFHCHFSPRDWQRLINNNWGFRPKRLNFKLFNIQVKEVTQNDGTTTIANNLTSTVQVFTDLEYQLPYVLGSAHQGCLPPFPADVFMVPQYGYLTLNNGSQAVGRSSFYCLEYFPSQMLRTGNNFTFSYTFEDVPFHSSYAHSQSLDRLMNPLIDQYLYYLSRTNTPSGTTTQSRLQFSQAGASDIRDQSRNWLPGPCYRQQRVSKTAADNNNSEYSWTGATKYHLNGRDSLVNPGPAMASHKDDEEKFFPQSGVLIFGKQGSEKTNVDIEKVMITDEEEIRTTNPVATEQYGSVSTNLQSGNTQAATSDVNTQGVLPGMVWQDRDVYLQGPIWAKIPHTDGHFHPSPLMGGFGLKHPPPQILIKNTPVPANPSTTFSAAKFASFITQYSTGQVSVEIEWELQKENSKRWNPEIQYTSNYNKSVNVDFTVDTNGVYSEPRPIGTRYLTRNL

SEQ ID NO: 2687 - DNA, 2205 bp, Artificial Sequence
  Synthetic polynucleotide
atggctgccgatggttatcttccagattggctcgaggacactctctctgaaggaataagacagtggtggaagctcaaacctggcccaccaccaaagcccgcagagcggcataaggacgacagcaggggtcttgtgcttcctggatacaagtacctcggacccttcaacggactcgacaagggagagccggtcaacgaggcagacgccgcggccctcgagcacgacaaggcctacgaccggcagctcgacagcggagacaacccgtacctcaagtacaaccacgccgacgcggagtttcaggagcgccttaaagaagatacgtcttttgggggcaacctcggacgagcagtcttccaggcgaaaaagagggttcttgaacctctgggcctggttgaggaacctgttaagacggctccgggaaaaaagaggcccgtagagcactctcctgtggagccagactcctcctcgggaaccggaaaagcgggcaaccagcctgcaagaaaaagattgaatttcggtcagactggagacgcagactccgtacctgacccccagcctctcggacagccaccagcagccccctctggtctgggaactaatacgatggctacaggcagtggcgcaccaatggcagacaataacgagggcgccgacggagtgggtaattcctcgggagattggcattgcgattccacatggatgggcgacagagtcatcaccaccagcacccgcacctgggccctgcccacctacaacaaccacctctacaagcagatttccagccaatcaggagccagcaatgacaaccactactttggctacagcaccccttgggggtattttgacttcaacagattccactgccacttttcgccacgcgactggcagagactcatcaacaacaactggggattccggcccaaaagactcaacctcaagctgtttaacattcaagtcaaggaggtcacgcagaatgacggtacgacgacgattgccaataaccttaccagcacggttcaggtgtttactgacttggagtaccagctcccgtacgtcctcggctcggcgcatcaaggatgcctcccgccgttcccagcagacgtcttcatggtgccacagtatggatacctcaccctgaacaacgggagtcaggcggtaggacgctcttccttttactgcctggagtactttccttctcagatgcttcgtaccggaaacaactttaccttcagctacacttttgaagacgttcctttccacagcagctacgctcacagtcaaagtctggaccgtctcatgaatcctctcatcgaccagtacctgtattacttgagcagaacaaacactccaagcggaaccactacgcagtccaggcttcagttttctcaggccggagcgagtgacattcgggaccagtctaggaactggcttcctggaccctgttaccgccagcagcgagtatcaaagacagctgcggataacaacaacggtgaatactcgtggactggagctaccaagtaccacctcaatggcagagactctctggtgaatccgggcccggccatggccagccacaaggacgatgaagaaaagttttttcctcaaagcggggttctcatctttgggaagcaaggctcagagaaaacaaatgtggacattgaaaaggtcatgattacagacgaagaggaaatcaggaccaccaatcccgtggctacggagcagtatggttctgtatctaccaacctccagagcggcaacacacgagcagctacctcagatgtcaacacacaaggcgttcttccaggcatggtctggcaggacagagacgtgtacctgcaggggcccatctgggcaaaaattccacacacggacggacattttcacccctctcccctcatgggcggatttggacttaaacaccctcctccacagattctcattaagaataccccggtacctgcgaatccttcgaccaccttcagcgcggcaaagtttgcttccttcatcacacagtattccacggggcaggtcagcgtggagatcgagtgggagctgcagaaggagaacagcaaacgctggaatcccgaaattcagtacacttccaactacaacaaatctgttaatgtggactttactgtggacactaatggggtgtattcagagcctcgccctattggcaccagatacctgactcgtaatctgtaa

SEQ ID NO: 2688 - DNA, 3156 bp, Artificial Sequence
  Synthetic polynucleotide
cgattgaatttagcggccgcgaattcgcccttgctgcgtcaacggaccaatgagaactttcccttcaacgattgcgtcgacaagatggtgatctggtgggaggagggaaagatgaccgccaaggtcgtggagtcggccaaagccattctcggaggaagcaaggtgcgtgtggaccaaaagtgcaagtcttcggcccagatcgacccgactcccgtgatcgtcacctccaacaccaacatgtgcgccgtgattgatggaaactcaacgaccttcgagcaccagcagccgttgcaagaccggatgttcaaatttgaacttacccgccgtctggatcatgactttggaaaggtcaccaagcaggaagtgaaagactttttccggtgggcaaaggatcacgtggttgaggtggagcatgagttctacgtcaaaaagggtggagccaaaaaaagacccgcccccagtgacgcagatataagtgagcccaaacgggcgcgcgagtcagttgcgcagccatcgacgtcagacgcggaagcttcgatcaactacgcggacaggtaccaaaacaaatgttctcgtcacgtgggcatgaatctgatgctgtttccctgcagacaatgcgagcgaatgaatcagaattcaaatatctgcttcactcacggacagaaagactgtttagagtgctttcccgtgtcagaatctcaacccgtttctgtcgtcaaaaaggcgtatcagaaactgtgctacattcatcacatcatgggaaaggtgccagacgcttgcactgcttgcgacctggtcaatgtggatttggatgactgcatctctgaacaataaatgatttaaatcaggtatggctgccgatggttatcttccagattggctcgaggacactctctctgaaggaataagacagtggtggaagctcaaacctggcccaccaccaaagcccgcagagcggcataaggacgacagcaggggtcttgtgcttcctggatacaagtacctcggacccttcaacggactcgacaagggagagccggtcaacgaggcagacgccgcggccctcgagcacgacaaggcctacgaccggcagctcgacagcggagacaacccgtacctcaagtacaaccacgccgacgcggagtttcaggagcgccttaaagaagatacgtcttttgggggcaacctcggacgagcagtcttccaggcgaaaaagagggttcttgaacctctgggcctggttgaggaacctgttaagacggctccgggaaaaaagaggcccgtagagcactctcctgtggagccagactcctcctcgggaaccggaaaagcgggcaaccagcctgcaagaaaaagattgaatttcggtcagactggagacgcagactccgtacctgacccccagcctctcggacagccaccagcagccccctctggtctgggaactaatacgatggctacaggcagtggcgcaccaatggcagacaataacgagggcgccgacggagtgggtaattcctcgggagattggcattgcgattccacatggatgggcgacagagtcatcaccaccagcacccgcacctgggccctgcccacctacaacaaccacctctacaagcagatttccagccaatcaggagccagcaatgacaaccactactttggctacagcaccccttgggggtattttgacttcaacagattccactgccacttttcgccacgcgactggcagagactcatcaacaacaactggggattccggcccaaaagactcaacctcaagctgtttaacattcaagtcaaggaggtcacgcagaatgacggtacgacgacgattgccaataaccttaccagcacggttcaggtgtttactgacttggagtaccagctcccgtacgtcctcggctcggcgcatcaaggatgcctcccgccgttcccagcagacgtcttcatggtgccacagtatggatacctcaccctgaacaacgggagtcaggcggtaggacgctcttccttttactgcctggagtactttccttctcagatgcttcgtaccggaaacaactttaccttcagctacacttttgaagacgttcctttccacagcagctacgctcacagtcaaagtctggaccgtctcatgaatcctctcatcgaccagtacctgtattacttgagcagaacaaacactccaagcggaaccactacgcagtccaggcttcagttttctcaggccggagcgagtgacattcgggaccagtctaggaactggcttcctggaccctgttaccgccagcagcgagtatcaaagacagctgcggataacaacaacggtgaatactcgtggactggagctaccaagtaccacctcaatggcagagactctctggtgaatccgggcccggccatggccagccacaaggacgatgaagaaaagttttttcctcaaagcggggttctcatctttgggaagcaaggctcagagaaaacaaatgtggacattgaaaaggtcatgattacagacgaagaggaaatcaggaccaccaatcccgtggctacggagcagtatggttctgtatctaccaacctccagagcggcaacacacgagcagctacctcagatgtcaacacacaaggcgttcttccaggcatggtctggcaggacagagacgtgtacctgcaggggcccatctgggcaaaaattccacacacggacggacattttcacccctctcccctcatgggcggatttggacttaaacaccctcctccacagattctcattaagaataccccggtacctgcgaatccttcgaccaccttcagcgcggcaaagtttgcttccttcatcacacagtattccacggggcaggtcagcgtggagatcgagtgggagctgcagaaggagaacagcaaacgctggaatcccgaaattcagtacacttccaactacaacaaatctgttaatgtggactttactgtggacactaatggggtgtattcagagcctcgccctattggcaccagatacctgactcgtaatctgtaattgcttgttaatcaataaaccgtttaattcgtttcagttgaactttggtctctgcgaagggcgaattcgtttaaacctgcaggactagtccctttagtgag

SEQ ID NO: 2689 - protein, 734 aa, Artificial Sequence
  Synthetic polypeptide
MAADGYLPDWLEDTLSEGIRQWWKLKPGPPPKPAERHKDDSRGLVLPGYKYLGPFNGLDKGEPVNEADAAALEHDKAYDRQLDSGDNPYLKYNHADAEFQERLKEDTSFGGNLGRAVFQAKKRVLEPLGLVEEPVKTAPGKKRPVEHSPVEPDSSSGTGKAGNQPARKRLNFGQTGDADSVPDPQPLGQPPAAPSGLGTNTMATGSGAPMADNNEGADGVGNSSGDWHCDSTWMGDRVITTSTRTWALPTYNNHLYKQISSQSGASNDNHYFGYSTPWGYFDFNRFHCHFSPRDWQRLINNNWGFRPKRLNLKLFNIQVKEVTQNDGTTTIANNLTSTVQVFTDLEYQLPYVLGSAHQGCLPPFPADVFMVPQYGYLTLNNGSQAVGRSSFYCLEYFPSQMLRTGNNFTFSYTFEDVPFHSSYAHSQSLDRLMNPLIDQYLYYLSRTNTPSGTTTQSRLQFSQAGASDIRDQSRNWLPGPCYRQQRVSKTAADNNNGEYSWTGATKYHLNGRDSLVNPGPAMASHKDDEEKFFPQSGVLIFGKQGSEKTNVDIEKVMITDEEEIRTTNPVATEQYGSVSTNLQSGNTRAATSDVNTQGVLPGMVWQDRDVYLQGPIWAKIPHTDGHFHPSPLMGGFGLKHPPPQILIKNTPVPANPSTTFSAAKFASFITQYSTGQVSVEIEWELQKENSKRWNPEIQYTSNYNKSVNVDFTVDTNGVYSEPRPIGTRYLTRNL

SEQ ID NO: 2690 - DNA, 2208 bp, Artificial Sequence
  Synthetic polynucleotide
atggctgccgatggttatcttccagattggctcgaggacactctctctgaaggaataagacagtggtggaagctcaaacctggcccaccaccaccaaagcccgcagagcggcataaggacgacagcaggggtcttgtgcttcctgggtacaagtacctcggacccttcaacggactcgacaagggagagccggtcaacgaggcagacgccgcggccctcgagcacgacaaggcctacgaccggcagctcgacagcggagacaacccgtacctcaagtacgaccacgccgacgcggagtttcaggagcgccttaaagaagatacgtcttttgggggcaacctcggacgagcagtcttccaggcaaaaaagagggttcttgaacctctgggcctggttgaggagcctgttaagacggctccgggaaaaaagaggccggtagagcactctcctgtggagccagactcctcctcgggaaccggaaaagcgggcaaccagcctgcaagaaagagattgaatttcggtcagactggagacgcagactccgtacctgacccccagcctctcggacagccaccagcagccccctctggtctgggaactaatacgatggctacaggcagtggcgcaccaatggcagacaataacgatggcgccgacggagtgggtaattcctcgggaaattggcattgcgattccacatggatgggcgacagagtcatcaccaccagcacccgaacctgggctctgcccacctacaacaaccatctgtacaagcagatttccagccaatcaggagccagcaacgacaaccactactttggctacagcaccccttgggggtattttgacttcaacagattccactgccacttttcaccacgtgactggcaaagactcatcaacaacaactggggattccggcccaagagactcaacttcaagctctttaacattcaagtcagagaggtcacgcagaatgatggtacgacgacgattgccaataaccttaccagcacggttcaggtgtttactgactcggagtaccagctcccgtacgtcctcggctcggcgcatcaaggatgcctcccgccgttcccagcagacgtcttcatggtgccacagtatggatacctcaccctgaacaacgggagtcaggcagtaggacgctcttcattttactgcctggagtacttcccttctcagatgctgcgtaccggaaacaactttaccttcagctacacctttgaggatgttcctttccacagcagctacgctcacagccagagtttggaccgtctcatgaatcctctcatcgaccagtacctgtattacttgagcagaacaaacactccaagcggaaccaccacgcagtccaggcttcagttttctcaggccggagcgagtgacattcgggatcagtctaggaactggcttcctggaccctgttaccgccagcagcgagtatcaaagacatctgcggacaacaacaacagtgaatactcgtggattggagctaccaagtaccacctcaatggcagagactctctggtgaatccgggcccggcaatggccagccacaaggacgatgaagaaaagttttttcctcagagcggggttctcatctttggaaaacaaggatcagagaaaacaaatgtggacattgaaaaggtcatgattacagacgaagaggaaatcagaaccaccaatcccgtggccacggagcagtatggttctgtatctaccaacctccagagcggcaacacacaagcatctactgcagatgtcaacacacaaggcgttcttccaggcatggtctggcaggacagagacgtgtacctgcaggggcctatctgggcaaagattccgcacacggacggacattttcacccctctcccctcatgggcggattcggacttaaacaccctcctccacagattctcatcaaaaacaccccggtacctgcgaatccttcgaccaccttcagtgcggcaaagtttgcttccttcatcacacagtattccacggggcgggtcagcgtggagatcgagtgggagctacagaaggagaacagcaaacgctggaatcccgagatccagtacacttccaactacaacaaatctgttaatgtggactttactgtggacactaatggtgtgtattcagagcctcgccccattggcaccagatacctgactcgtaatctgtaa

SEQ ID NO: 2691 - protein, 735 aa, Artificial Sequence
  Synthetic polypeptide
MAADGYLPDWLEDTLSEGIRQWWKLKPGPPPPKPAERHKDDSRGLVLPGYKYLGPFNGLDKGEPVNEADAAALEHDKAYDRQLDSGDNPYLKYDHADAEFQERLKEDTSFGGNLGRAVFQAKKRVLEPLGLVEEPVKTAPGKKRPVEHSPVEPDSSSGTGKAGNQPARKRLNFGQTGDADSVPDPQPLGQPPAAPSGLGTNTMATGSGAPMADNNDGADGVGNSSGNWHCDSTWMGDRVITTSTRTWALPTYNNHLYKQISSQSGASNDNHYFGYSTPWGYFDFNRFHCHFSPRDWQRLINNNWGFRPKRLNFKLFNIQVREVTQNDGTTTIANNLTSTVQVFTDSEYQLPYVLGSAHQGCLPPFPADVFMVPQYGYLTLNNGSQAVGRSSFYCLEYFPSQMLRTGNNFTFSYTFEDVPFHSSYAHSQSLDRLMNPLIDQYLYYLSRTNTPSGTTTQSRLQFSQAGASDIRDQSRNWLPGPCYRQQRVSKTSADNNNSEYSWIGATKYHLNGRDSLVNPGPAMASHKDDEEKFFPQSGVLIFGKQGSEKTNVDIEKVMITDEEEIRTTNPVATEQYGSVSTNLQSGNTQASTADVNTQGVLPGMVWQDRDVYLQGPIWAKIPHTDGHFHPSPLMGGFGLKHPPPQILIKNTPVPANPSTTFSAAKFASFITQYSTGRVSVEIEWELQKENSKRWNPEIQYTSNYNKSVNVDFTVDTNGVYSEPRPIGTRYLTRNL

SEQ ID NO: 2692 - DNA, 2217 bp, Artificial Sequence
  Synthetic polynucleotide
atggctgccgatggttatcttccagattggctcgaggacaacctctctgagggcattcgcgagtggtgggacttgaaacctggagccccgaaacccaaagccaaccagcaaaagcaggacgacggccggggtctggtgcttcctggctacaagtacctcggacccttcaacggactcgacaagggggagcccgtcaacgcggcggacgcagcggccctcgagcacgacaaggcctacgaccagcagctcaaagcgggtgacaatccgtacctgcggtataaccacgccgacgccgagtttcaggagcgtctgcaagaagatacgtcttttgggggcaacctcgggcgagcagtcttccaggccaagaagcgggttctcgaacctctcggtctggttgaggaaggcgctaagacggctcctggaaagaagagaccggtagagccatcaccccagcgttctccagactcctctacgggcatcggcaagacaggccagcagcccgcgaaaaagagactcaactttgggcagactggcgactcagagtcagtgcccgaccctcaaccaatcggagaaccccccgcaggcccctctggtctgggatctggtacaatggctgcaggcggtggcgctccaatggcagacaataacgaaggcgccgacggagtgggtagttcctcaggaaattggcattgcgattccgcatggctgggcgacagagtcatcaccaccagcacccgaccctgggccctccccacctacaacaaccacctctacaagcaaatctccaacgggacatcgggaggaagcaccaacgacaacacctacttcggctacagcaccccctgggggtattttgactttaacagattccactgccacttctcaccacgtgactggcagcgactcatcaacaacaactggggattccggcccaagagactcaacttcaagctcttcaacatccaggtcaaggaggtcacgcagaatgaaggcaccaagaccatcgccaataaccttaccagcacgattcaggtctttacggactcggaataccagctcccgtacgtcctcggctctgcgcaccagggctgcccgcctccgttcccggcggacgtcttcatgattcctcagtacgggtacctgactctgaacaacggcagtcaggccgtgggccgttcctccttctactgcctggagtactttccttctcaaatgcggagaacgggcaacaactttgagttcagctaccagtttgaggacgtgccttttcacagcagctacgcgcatagccaaagcctggaccggctgatgaaccccctcatcgaccagtacctgtactacctgtctcggactcagtccacgggaggtaccgcaggaactcagcagttgctattttctcaggccgggcctaataacatgtcggctcaggccaaaaactggctacccgggccctgctaccggcagcaacgcgtctccacgacactgtcgcaaaataacaacagcaactttgcttggaccggtgccaccaagtatcatctgaatggcagagactctctggtaaatcccggtgtcgctatggcaacgcacaaggacgacgaagagcgattttttccatccagcggagtcttgatgtttgggaaacagggagctggaaaagacaacgtggactatagcagcgttatgctaaccagtgaggaagaaatcaaaaccaccaacccagtggccacagaacagtacggcgtggtggccgataacctgcaacagcaaaacgccgctcctattgtaggggccgtcaacagtcaaggagccttacctggcatggtctggcagaaccgggacgtgtacctgcagggtcctatctgggccaagattcctcacacggacggcaactttcatccttcgccgctgatgggaggctttggactgaaacacccgcctcctcagatcctgattaagaatacacctgttcccgcggatcctccaactaccttcagtcaagccaagctggcgtcgttcatcacgcagtacagcaccggacaggtcagcgtggaaattgaatgggagctgcagaaagagaacagcaagcgctggaacccagagattcagtatacttccaactactacaaatctacaaatgtggactttgctgtcaatactgagggtacttattcagagcctcgccccattggcacccgttacctcacccgtaacctgtaa

SEQ ID NO: 2693 - protein, 738 aa, Artificial Sequence
  Synthetic polypeptide
MAADGYLPDWLEDNLSEGIREWWDLKPGAPKPKANQQKQDDGRGLVLPGYKYLGPFNGLDKGEPVNAADAAALEHDKAYDQQLKAGDNPYLRYNHADAEFQERLQEDTSFGGNLGRAVFQAKKRVLEPLGLVEEGAKTAPGKKRPVEPSPQRSPDSSTGIGKTGQQPAKKRLNFGQTGDSESVPDPQPIGEPPAGPSGLGSGTMAAGGGAPMADNNEGADGVGSSSGNWHCDSAWLGDRVITTSTRPWALPTYNNHLYKQISNGTSGGSTNDNTYFGYSTPWGYFDFNRFHCHFSPRDWQRLINNNWGFRPKRLNFKLFNIQVKEVTQNEGTKTIANNLTSTIQVFTDSEYQLPYVLGSAHQGCPPPFPADVFMIPQYGYLTLNNGSQAVGRSSFYCLEYFPSQMRRTGNNFEFSYQFEDVPFHSSYAHSQSLDRLMNPLIDQYLYYLSRTQSTGGTAGTQQLLFSQAGPNNMSAQAKNWLPGPCYRQQRVSTTLSQNNNSNFAWTGATKYHLNGRDSLVNPGVAMATHKDDEERFFPSSGVLMFGKQGAGKDNVDYSSVMLTSEEEIKTTNPVATEQYGVVADNLQQQNAAPIVGAVNSQGALPGMVWQNRDVYLQGPIWAKIPHTDGNFHPSPLMGGFGLKHPPPQILIKNTPVPADPPTTFSQAKLASFITQYSTGQVSVEIEWELQKENSKRWNPEIQYTSNYYKSTNVDFAVNTEGTYSEPRPIGTRYLTRNL

SEQ ID NO: 2694 - protein, 735 aa, Artificial Sequence
  Synthetic polypeptide
MAADGYLPDWLEDTLSEGIRQWWKLKPGPPPPKPAERHKDDSRGLVLPGYKYLGPFNGLDKGEPVNEADAAALEHDKAYDRQLDSGDNPYLKYNHADAEFQERLKEDTSFGGNLGRAVFQAKKRVLEPLGLVEEPVKTAPGKKRPVEHSPVEPDSSSGTGKAGQQPARKRLNFGQTGDADSVPDPQPLGQPPAAPSGLGSTTMATGSGAPMADNNEGADGVGNSSGNWHCDSQWLGDRVITTSTRTWALPTYNNHLYKQISSQSGASNDNHYFGYSTPWGYFDFNRFHCHFSPRDWQRLINNNWGFRPKRLNFKLFNIQVKEVTQNDGTTTIANNLTSTVQVFTDSEYQLPYVLGSAHQGCLPPFPADVFMVPQYGYLTLNNGSQAVGRSSFYCLEYFPSQMLRTGNNFQFSYTFEDVPFHSSYAHSQSLDRLMNPLVDQYLYYLNKTQTNSGTLQQSRLLFSQAGPTNMSLQAKNWLPGPCYRQQRLSKQANDNNNSNFPWTAATKYHLNGRDSLVNPGPAMASHKDDEEKFFPMHGTLIFGKQGTNANDADLENVMITDEEEIRTTNPVATEQYGTVSNNLQNSNTGPTTGTVNHQGALPGMVWQDRDVYLQGPIWAKIPHTDGHFHPSPLMGGFGLKHPPPQIMIKNTPVPANPPTNFSSAKFASFITQYSTGQVSVEIEWELQKENSKRWNPEIQYTSNYNKSVNVDFTVDTNGVYSEPRPIGTRYLTRNL

SEQ ID NO: 2695 - DNA, 3158 bp, Artificial Sequence
  Synthetic polynucleotide
gattgaatttagcggccgcgaattcgcccttgctgcgtcaactggaccaatgagaactttcctttcaatgattgcgtcgacaagatggtgatctggtgggaggagggaaagatgaccgccaaggtcgtggagtcggccaaagccattctcggaggaagcaaggtgcgcgcggaccagaaatgcaagtcctcggcccagatagacccgactcccgtgattgtcacctccaacaccaacatgtgcgccgtgattgacgggaactcaacgaccttcgaacaccagcagccgttgcaagaccggatgttcaaatttgaactcacccgccgtctggatcatgactttgggaaggtcaccaagcaggaagtcaaagactttttccggtgggcaaaggatcacgtggttgaggtggagcatgaattctacgtcaaaaagggtggagctaagaaaagacccgcccccagtgacgcagatataagtgagcccaaacgggcgcgcgagtcagttgcgcagccatcgacgtcagacgcggaagcttcgatcaactacgcgggcaggtaccaaaacaaatgttctcgtcacgtgggcatgaatctgatgctgtttccctgcagacaatgcgagagaatgaatcagaattcaaatatctgcttcactcacggacagaaagactgtttagagtgctttcccgtgtcagaatctcaacccgtttctgtcgtcaaaaaggcgtatcagaaactttgctacattcatcatatcatgggaaaggtgccagacgcttgcactgcctgcgatctggtcaatgtggatttggatgactgcatctctgaacaataaatgatttaaatcaggtatggctgccgatggttatcttccagattggctcgaggacactctctctgaaggaataagacagtggtggaagctcaaacctggcccaccaccaccaaagcccgcagagcggcataaggacgacagcaggggtcttgtgcttcctgggtacaagtacctcggacccttcaacggactcgacaagggggagccggtcaacgaggcagacgccgcggccctcgagcacgacaaggcctacgaccggcagctcgacagcggagacaacccgtacctcaagtacaaccacgccgacgcggagtttcaggagcgccttaaagaagatacgtcttttgggggcaacctcggacgagcagtcttccaggcaaaaaagagggttcttgaacctctgggcctggttgaggaacctgttaaaacggctccgggaaaaaagaggccggtagagcactctcctgtggagccagactcctcctcgggaaccggaaaagcgggccagcagcctgcaagaaaaagattgaatttcggtcagactggagacgcagactccgtacctgacccccagcctctcggacagccaccagcagccccctctggtctgggatctactacaatggctacaggcagtggcgcaccaatggcagacaataacgagggtgccgatggagtgggtaattcctcgggaaattggcattgcgattcccaatggctgggcgacagagtcatcaccaccagcacccgcacctgggccctgcccacctacaacaaccacctctacaagcaaatctccagccaatcaggagcctcaaacgacaaccactactttggctacagcaccccctgggggtattttgacttcaacagattccactgccacttttcaccacgtgactggcaaagactcatcaacaacaactggggattccgacccaagagactcaacttcaagctctttaacattcaagtcaaagaggtcacgcagaatgacggtacgacgacgattgccaataaccttaccagcacggttcaggtgtttactgactcggagtaccagctcccgtacgtcctcggctcggcgcatcaaggatgcctcccgccgtttccagcggacgtcttcatggtcccacagtatggatacctcaccctgaacaacgggagtcaggcagtaggacgctcttcattttactgcctggagtactttccttctcagatgctgcgtaccggaaacaactttcaattcagctacacttttgaagacgtgcctttccacagcagctacgctcacagccagagtctggatcggctgatgaatcctctggtcgaccagtacctgtattatctgaacaagacacaaacaaatagtggaactcttcagcagtctcggctactgtttagccaagctggacccaccaacatgtctcttcaagctaaaaactggctgcctggaccttgctacagacagcagcgtctgtcaaagcaggcaaacgacaacaacaacagcaactttccctggactgcagctacaaagtatcatctaaatggccgggactcgttggttaatccaggaccagctatggccagtcacaaggatgacgaagaaaagtttttccccatgcatggaacccttatatttggtaaacaaggaacaaatgccaacgacgcggatttggaaaatgtcatgattacagatgaagaagaaatcaggaccaccaatcccgtggctacggagcagtacggaactgtatcaaataatttgcaaaactcaaacactggtccaactactggaactgtcaatcaccaaggagcgttacctggtatggtgtggcaggatcgagacgtgtacctgcagggacccatttgggccaagattcctcacaccgatggacactttcatccttctccactgatgggaggttttggactcaaacacccacctcctcaaatcatgatcaaaaacactcccgttccagccaatcctcccacaaacttcagttctgccaagtttgcttctttcatcacacagtattccacggggcaggtcagcgtggagatcgagtgggagctgcagaaggagaacagcaaacgctggaatcccgaaattcagtacacttccaactacaacaaatctgttaatgtggactttactgtggacactaatggtgtgtattcagagcctcgccccattggcaccagatacctgactcgtaatctgtaattgcttgttaatcaataaaccgtttaattcgtttcagttgaactttggtctctgcgaagggcgaattcgtttaaacctgcaggactagtccctttagtga

SEQ ID NO: 2696 - protein, 735 aa, Artificial Sequence
  Synthetic polypeptide
MAADGYLPDWLEDTLSEGIRQWWKLKPGPPPPKPAERHKDDSRGLVLPGYKYLGPFNGLDKGEPVNEADAAALEHDKAYDRQLDSGDNPYLKYNHADAEFQERLKEDTSFGGNLGRAVFQAKKRVLEPLGLVEEPVKTAPGKKRPVEHPPVEPDSSSGTGKAGQQPARKRLNFGQTGDADSVPDPQPLGQPPAAPSGLGSTTMATGSGAPMADNNEGADGVGNSSGNWHCDSQWLGDRVITTSTRTWALPTYNNHLYKQISSQSGASNDNHYFGYSTPWGYFDFNRFHCHFSPRDWQRLINNNWGFRPKRLNFKLFNIQVKEVTQNDGTTTIANNLTSTVQVFTDSEYQLPYVLGSAHQGCLPPFPADVFMVPQYGYLTLNNGSQAVGRSSFYCLEYFPSQMLRTGNNFQFSYTFEDVPFHSSYAHSQSLDRLMNPLIDQYLYYLNKTQTNSGTLQQSRLLFSQAGPTNMSLQAKNRLPGPCYRQQRLSKQANDNNNSNFPWTAATKYHLNGRDSLVNPGPAMASHKDDEEKFFPMHGTLIFGKQGTNANDADLENVMITDEEEIRTTNPVATEQYGTVSNNLQNSNTGPTTGTVNHQGALPGMVWQDRDVYLQGPIWAKIPHTDGHFHPSPLVGGFGLKHPPPQIMIKNTPVPANPPTNFSSAKFASFITQYSTGQVSVEIEWELQKENSKRWNPEIQYTSNYNKSVNVDFTVDTNGVYSEPRPIGTRYLTRNL

SEQ ID NO: 2697 - DNA, 3159 bp, Artificial Sequence
  Synthetic polynucleotide
gattgaatttagcggccgcgaattcgcccttgctgcgtcaactggaccaatgagaactttcctttcaatgattgcgtcgacaagatggtgatctggtgggaggagggaaagatgaccgccaaggtcgtggagtcggccaaagccattctcggaggaagcaaggtgcgcgtggaccagaaatgcaagtcctcggcccagatagacccgactcccgtgattgtcacctccaacaccgacatgtgcgccgtgattgacgggaactcaacgaccttcgaacaccagcagccgttgcaagaccggatgttcaaatttgaactcacccgccgtctggatcatgactttgggaaggtcaccaagcaggaagtcaaagactttttccggtgggcaaaggatcacgtggttgaggtggagcatgaattctacgtcaaaaagggtggagctaagaaaagacccgcccccagtgacgcagatataagtgagcccaaacgggcgcgcgagtcagttgcgcagccatcgacgtcagacgcggaagcttcgatcaactacgcggacaggtaccaaaacaaatgttctcgtcacgtgggcatgaatctgatgctgtttccctgcagacaatgcgagagaatgaatcagaattcaaatatctgcttcactcacggacagaaagactgtttagagtgctttcccgtgtcagaatctcaacccgtttctgtcgtcaaaaaggcgtatcagaaactttgctacattcatcatatcatgggaaaggtgccagacgcttgcactgcctgcgatctggtcaatgtggatttggatgactgcatctctgaacaataaatgatttaaatcaggtatggctgccgatggttatcttccagattggctcgaggacactctctctgaaggaataagacagtggtggaagctcaaacctggcccaccaccaccaaagcccgcagagcggcataaggacgacagcaggggtcttgtgcttcctgggtacaagtacctcggacccttcaacggactcgacaagggggagccggtcaacgaggcagacgccgcggccctcgagcacgacaaggcctacgaccggcagctcgacagcggagacaacccgtacctcaagtacaaccacgccgacgcggagtttcaggagcgccttaaagaagatacgtcttttgggggcaacctcggacgagcagtcttccaggcaaaaaagagggttcttgaacctctgggcctggttgaggaacctgttaaaacggctccgggaaaaaagaggccggtagagcaccctcctgtggagccagactcctcctcgggaaccggaaaagcgggccagcagcctgcaagaaaaagattgaatttcggtcagactggagacgcagactccgtacctgacccccagcctctcggacagccaccagcagccccctctggtctgggatctactacaatggctacaggcagtggcgcaccaatggcagacaataacgagggtgccgatggagtgggtaattcctcgggaaattggcattgcgattcccaatggctgggcgacagagtcatcaccaccagcacccgcacctgggccctgcccacctacaacaaccacctctacaagcaaatctccagccaatcaggagcctcaaacgacaaccactactttggctacagcaccccctgggggtattttgacttcaacagattccactgccacttttcaccacgtgactggcaaagactcatcaacaacaactggggattccgacccaagagactcaacttcaagctctttaacattcaagtcaaagaggtcacgcagaatgacggtacgacgacgattgccaataaccttaccagcacggttcaggtgtttactgactcggagtaccagctcccgtacgtcctcggctcggcgcatcaaggatgcctcccgccgtttccagcggacgtcttcatggtcccacagtatggatacctcaccctgaacaacgggagtcaggcagtaggacgctcttcattttactgcctggagtactttccttctcagatgctgcgtaccggaaacaactttcagttcagctacacttttgaagacgtgcctttccacagcagctacgctcacagccagagtctggatcggctgatgaatcctctgatcgaccagtacctgtattatctgaacaagacacaaacaaatagtggaactcttcagcagtctcggctactgtttagccaagctggacccaccaacatgtctcttcaagctaaaaaccggctgcctggaccttgctacagacagcagcgtctgtcaaagcaggcaaacgacaacaacaacagcaactttccctggaccgcagctacaaagtatcatctaaatggccgggactcgttggttaatccaggaccagctatggccagtcacaaggatgacgaagaaaagtttttccccatgcatggaacccttatatttggtaaacaaggaacaaatgccaacgacgcggatttggaaaatgtcatgattacagatgaagaagaaatcaggaccaccaatcccgtggctacggagcagtacggaactgtatcaaataatttgcaaaactcaaacactggtccaactactggaactgtcaatcaccaaggagcgttacctggtatggtgtggcaggatcgagacgtgtacctgcagggacccatttgggccaagattcctcacaccgatggacactttcatccttctccactggtgggaggttttggactcaaacacccacctcctcaaatcatgatcaaaaacactcccgttccagccaatcctcccacaaacttcagttctgccaagtttgcttctttcatcacacagtattccacggggcaggtcagcgtggagatcgagtgggagctgcagaaggagaacagcaaacgctggaatcccgaaattcagtacacttccaactacaacaaatctgttaatgtggactttactgtggacactaatggtgtgtattcagagcctcgccccattggcaccagatacctgactcgtaatctgtaattgcttgttaatcaataaaccgtttaattcgtttcagttgaactttggtctctgcgaagggcgaattcgtttaaacctgcaggactagtccctttagtgag

SEQ ID NO: 2698 - DNA, 2208 bp, Artificial Sequence
  Synthetic polynucleotide
atggctgccgatggttatcttccagattggctcgaggacactctctctgaaggaataagacagtggtggaagctcaaacctggcccaccaccaccaaagcccgcagagcggcataaggacgacagcaggggtcttgtgcttcctgggtacaagtaccttggacccttcaacggactcgacaagggagagccggtcaacgaggcagacgccgcggccctcgagcacgacaaggcctacgaccggcagctcgacagcggagacaacccgtaccccaagtacaaccacgccgacgcggagttccaggagcgtcttaaagaagatacgtcttttgggggcaacctcggacgagcagtcttccaggcgaaaaagagggttcttgaacctctgggcctggttgaggaacctgttaagacggctccgggaaaaaagaggccggtagagcactctcctgcggagccagactcctcctcgggaaccggaaaagcgggccagcagcctgcaagaaagagattgaatttcggtcagactggagacgcagactccgtacctgacccccagcctctcggacagccaccagcagccccctctggtctgggaactaatacgatggctacaggcagtggcgcaccaatggcagacaataacgagggcgccgacggagtgggtaattcctcgggaaattggcattgcgattccacatggatgggcgacagagtcatcaccaccagcacccgcacctgggctctgcccacctacaacaaccacctctacaagcagatttccagccaatcaggagcctcaaacgacaaccactactttggctacagcaccccttgggggtattttgacttcaacagattccactgccacttttcgccacgtgactggcaaagactcatcaacaacaattggggattccggcccaaaagactcaacttcaagctctttaacattcaagtcaaggaggtcacgcagaatgacggtacgacgacgattgccaataaccttaccagcacggttcaggtgtttactgactcggagtaccagctcccgtacgtcctcggctcggcgcatcaaggatgcctcccgccgttcccagcagacgtcttcatggtgccacagtatggatacctcaccctgaacaacgggagtcaggcagtaggacgctcttcattttactgcctggagtactttccttctcagatgctgcgtaccggaaacaactttaccttcagctacacctttgaggacgttcctttccacagcagctacgcccacagccagagtttggaccgtctcatgaatcctctcatcgaccagtacctgtattacttgagcagaacaaacactccaagcggaaccaccacgcagtcaaggcttcagttttctcaggccggagcaagtgacattcgggaccagtctaggaactggcttcctggaccctgttaccgccagcagcgagtatcaaagacatctgcggataacaacaacagtgaatactcgtggactggagctaccaagtaccaccttaatggaagagactctctggtgaatccgggcccggccatggccagccacaaggacgatgaagaaaagttttttcctcagagcggggttctcatctttggaaaacaagactcgggaaaaactaatgtggacattgaaaaggtcatgattacagacgaagaggaaatcaggaccaccaatcccgtggctacggagcagtatggttctgtatctaccaacctccagagcggcaacacacaagcagctacctcagatgtcaacacacaaggcgttcttccaggcatggtgtggcaggacagagacgtgtacctgcaggggcccatctgggcaaagattccacacacggacggacattttcacccctctcccctcatgggcggattcggacttaaacaccctcccccgcagattctcatcaagaacaccccggtacctgcgaatccttcgactaccttcagtgcggcaaagtttgcttccttcattacacagtactccacggggcaggtcagcgtggagatcgagtgggagctgcagaaggagaacagcaaacgctggaatcccgagattcagtacacttccaactacaacaaatctgttaatgtggactttactgtggacactaatggtgtgtattcagagcctcgccccattggcaccaggtacctgactcgtaatctgtaa

SEQ ID NO: 2699 - protein, 735 aa, Artificial Sequence
  Synthetic polypeptide
MAADGYLPDWLEDTLSEGIRQWWKLKPGPPPPKPAERHKDDSRGLVLPGYKYLGPFNGLDKGEPVNEADAAALEHDKAYDRQLDSGDNPYPKYNHADAEFQERLKEDTSFGGNLGRAVFQAKKRVLEPLGLVEEPVKTAPGKKRPVEHSPAEPDSSSGTGKAGQQPARKRLNFGQTGDADSVPDPQPLGQPPAAPSGLGTNTMATGSGAPMADNNEGADGVGNSSGNWHCDSTWMGDRVITTSTRTWALPTYNNHLYKQISSQSGASNDNHYFGYSTPWGYFDFNRFHCHFSPRDWQRLINNNWGFRPKRLNFKLFNIQVKEVTQNDGTTTIANNLTSTVQVFTDSEYQLPYVLGSAHQGCLPPFPADVFMVPQYGYLTLNNGSQAVGRSSFYCLEYFPSQMLRTGNNFTFSYTFEDVPFHSSYAHSQSLDRLMNPLIDQYLYYLSRTNTPSGTTTQSRLQFSQAGASDIRDQSRNWLPGPCYRQQRVSKTSADNNNSEYSWTGATKYHLNGRDSLVNPGPAMASHKDDEEKFFPQSGVLIFGKQDSGKTNVDIEKVMITDEEEIRTTNPVATEQYGSVSTNLQSGNTQAATSDVNTQGVLPGMVWQDRDVYLQGPIWAKIPHTDGHFHPSPLMGGFGLKHPPPQILIKNTPVPANPSTTFSAAKFASFITQYSTGQVSVEIEWELQKENSKRWNPEIQYTSNYNKSVNVDFTVDTNGVYSEPRPIGTRYLTRNL

SEQ ID NO: 2700 - DNA, 2208 bp, Artificial Sequence
  Synthetic polynucleotide
atggctgccgatggttatcttccagattggctcgaggacactctctctgaaggaataagacagtggtggaagctcaaacctggcccaccaccaccaaagcccgcagagcggcataaggacgacagcaggggtcttgtgcttcctgggtacaagtaccttggacccttcaacggactcgacaagggagagccggtcaacgaggcagacgccgcggccctcgagcacgacaaggcctacgaccggcagctcgacggcggagacaacccgtacctcaagtacaaccacgccgacgcggagttccaggagcgtcttaaagaagatacgtcttttgggggcaacctcggacgagcagtcttccaggcgaaaaagagggttcttgaacctctgggcctggttgaggaacctgttaagacggctccgggaaaaaagaggccggtagagcactctcttgcggagccagactcctcctcgggaaccggaaaagcgggccagcagcctgcaagaaggagattgaatttcggtcagactggagacgcagactccgtacctgacccccagcctctcggacagccaccagcagccccctctggtctgggaactaatacgatggctacaggcagtggcgcaccaatggcagacaataacgagggcgccgacggagtgggtaattcctcgggaaattggcattgcgattccacatggatgggcgacagagtcatcaccaccagcacccgcacctgggctctgcccacctacaacaaccacctctacaggcagatttccagccaatcaggagcctcaaacgacaaccactactttggctacagcaccccttgggggtattttgacttcaacagattccactgccacttttcgccacgtgactggcaaagactcatcaacaacaattggggatcccggcccaaaagactcaacttcaagctctttaacattcaagtcaaggaggtcacgcagaatgacggtacgacgacgattgccaataaccttaccagcacggttcaggtgtttactgactcggagtaccagctcccgtacgtcctcggctcggcgcatcaaggatgcctcccgccgttcccagcagacgtcttcatggtgccacagtatggatacctcaccctgaacaacgggagtcaggcagtaggacgctcttcattttactgcctggagtactttccttctcagatgctgcgtaccggaaacaactttaccttcagctacacctttgaggacgttcctttccacagcagctacgcccacagccagagtttggaccgtctcatgaatcctctcgtcgaccagtacctgtattacttgagcagaacaaacactccaagcggaaccaccacgcagtcaaggcttcagttttctcaggccggagcaagtgacattcgggaccagtctaggaactggcttcctggaccctgttaccgccagcagcgagtatcaaagacatctgcggataacaacaacagtgaatactcgtggactggagctaccaagtaccaccttaatggaagagactctctggtgaatccgggcccggccatggccagccacaaggacgatgaagaaaagttttttcctcagagcggggttctcatctttggaaaacaagactcgggaaaaactaatgtggacattgaaaaggtcatgattacagacgaagaggaaatcaggaccaccaatcccgtggctacggagcagtatggttctgtatctaccaacctccagagcggcaacacacaagcagctacctcagatgtcaacacacaaggcgttcttccaggcatggtgtggcaggacagagacgtgtacctgcaggggcccatctgggcaaagattccacacacggacggacattttcacccctctcccctcatgggcggattcggacttaaacaccctcccccgcagattctcatcaagaacaccccggtacctgcgaatccttcgactaccttcagtgcggcaaagtttgcttccttcattacacagtactccacggggcaggtcagcgtggagatcgagtgggagctgcagaaggagaacagcaaacgctggaatcccgagattcagtacacttccaactacaacaaatctgttaatgtggactttactgtggacactaatggtgtgtattcagagcctcgccccattggcaccagatacctgactcgtaatctgtaa

SEQ ID NO: 2701 - protein, 735 aa, Artificial Sequence
  Synthetic polypeptide
MAADGYLPDWLEDTLSEGIRQWWKLKPGPPPPKPAERHKDDSRGLVLPGYKYLGPFNGLDKGEPVNEADAAALEHDKAYDRQLDGGDNPYLKYNHADAEFQERLKEDTSFGGNLGRAVFQAKKRVLEPLGLVEEPVKTAPGKKRPVEHSLAEPDSSSGTGKAGQQPARRRLNFGQTGDADSVPDPQPLGQPPAAPSGLGTNTMATGSGAPMADNNEGADGVGNSSGNWHCDSTWMGDRVITTSTRTWALPTYNNHLYRQISSQSGASNDNHYFGYSTPWGYFDFNRFHCHFSPRDWQRLINNNWGSRPKRLNFKLFNIQVKEVTQNDGTTTIANNLTSTVQVFTDSEYQLPYVLGSAHQGCLPPFPADVFMVPQYGYLTLNNGSQAVGRSSFYCLEYFPSQMLRTGNNFTFSYTFEDVPFHSSYAHSQSLDRLMNPLVDQYLYYLSRTNTPSGTTTQSRLQFSQAGASDIRDQSRNWLPGPCYRQQRVSKTSADNNNSEYSWTGATKYHLNGRDSLVNPGPAMASHKDDEEKFFPQSGVLIFGKQDSGKTNVDIEKVMITDEEEIRTTNPVATEQYGSVSTNLQSGNTQAATSDVNTQGVLPGMVWQDRDVYLQGPIWAKIPHTDGHFHPSPLMGGFGLKHPPPQILIKNTPVPANPSTTFSAAKFASFITQYSTGQVSVEIEWELQKENSKRWNPEIQYTSNYNKSVNVDFTVDTNGVYSEPRPIGTRYLTRNL

SEQ ID NO: 2702 - protein, 738 aa, Artificial Sequence
  Synthetic polypeptide
MAADGYLPDWLEDNLSEGIREWWDLKPGAPKPKANQQKQDDGRGLVLPGYKYLGPFNGLDKGEPVNAADAAALEHDKAYDQQLKAGDNPYLRYNHADAEFQERLQEDTSFGGNLGRAVFQAKKRVLEPLGLVEEAAKTAPGKKRPVEPSPQRSPDSSAGIGKKGQQPAKKRLNFGQTGDSESVPDPQPIGEPPAGPSGLGSGTMAAGGGAPMADNNEGADGVGSSSGNWHCDSTWLGDRVITTSTRTWALPTYNNHLYKQISNGTSGGSTNDNTYFGYSTPWGYFDFNRFHCHFSPRDWQRLINNNWGFRPKRLSFKLFNIQVKEVTQNEGTETIANNLTSTIQVFTDSEYQLPYVLGSAHQGCLPPFPADVFMIPQYGYLTLNNGSQAVGRSSFYCLEYFPSQMLRTGNNFEFSYTFEDVPFHSSCAHSQSSDRLMNPLIDQYLYYLSRTRSTGGTQGTQQLLFSQAGPANMSAQAKNWLPGPCYRQQRVSTTLSQNNNSNFAWTGATKYHLNGRDSLVNPGVAMATHKDDEERFFPSSGVLMFGKQGAGRDNVDYSSVMLTSEEEIKTTNPVATEQYGVVADNLQQTNTGPIVGNVNSQGALPGMVWQNRDVYLQGPIWAKIPHTDGNFHPSPLMGGFGLKHPPPQILIKNTPVPADPPTTFSQAKLASFITQYSTGQVSVEIEWELQKENSKRWNPEIQYTSNYYKSTNVDFAVNTEGTYSEPRPIGTRYLTRNL

SEQ ID NO: 2703 - DNA, 2217 bp, Artificial Sequence
  Synthetic polynucleotide
atggctgctgacggttatcttccagattggctcgaggacaacctctctgagggcattcgcgagtggtgggacctgaaacctggagcccccaagcccaaggccaaccagcagaagcaggacgacggccggggtctggtgcttcttggctacaagtacctcggacccttcaacggactcgacaagggggagcccgtcaatgcggcggacgcagcggccctcgagcacgacaaggcctacgaccagcagctcaaagcgggtgacaatccgtacctgcggtataaccacgccgacgccgagtttcaggagcgtctgcaagaagatacgtcttttgggggcaacctcgggcgagcagtcttccaggccaagaagcgggttctcgaacctctcggtctggttgaggaagctgctaagacggctcctggaaagaagagaccggtagaaccgtcacctcagcgttcccccgactcctccacgggcatcggcaagaaaggccagcagcccgctaaaaagagactgaactttggtcagactggcgactcagagtcagtccccgaccctcaaccaatcggagaaccaccagcaggcccctctggtctgggatctggtacaatggctgcaggcggtggcgctccaatggcagacaataacgaaggcgccgacggagtgggtagttcctcaggaaattggcattgcgattccacatggctgggcgacagagtcatcaccaccagcacccgaacctgggccctgcccacctacaacaaccacctctacaagcaaatatccaatgggacatcgggaggaagcaccaacgacaacacctacttcggctacagcaccccctgggggtattttgacttcaacagattccactgccacttctcaccacgtgactggcagcgactcatcaacaacaactggggattccggccaaaaagactcagcttcaagctcttcaacatccaggtcaaggaggtcacgcagaatgaaggcaccaagaccatcgccaataaccttaccagcacgattcaggtatttacggactcggaataccagctgccgtacgtcctcggctccgcgcaccagggctgcctgcctccgttcccggcggacgtcttcatgattccccagtacggctaccttacactgaacaatggaagtcaagccgtaggccgttcctccttctactgcctggaatattttccatctcaaatgctgcgaactggaaacaattttgaattcagctacaccttcgaggacgtgcctttccacagcggctacgcacacagccagagcttggaccgactgatgaatcctctcatcgaccagtacctgtactacttatccagaactcagtccacaggaggaactcaaggtacccagcaattgttattttctcaagctgggcctgcaaacatgtcggctcaggctaagaactggctacctggaccttgctaccggcagcagcgagtctctacgacactgtcgcaaaacaacaacagcaactttgcttggactggtgccaccaaatatcacctgaacggaagagactctttggtaaatcccggtgtcgccatggcaacccacaaggacgacgaggaacgcttcttcccgtcgagtggagtcctgatgtttggaaaacagggtgctggaagagacaatgtggactacagcagcgttatgctaaccagcgaagaagaaattaaaaccactaaccctgtagccacagaacaatacggtgtggtggctgacaacttgcagcaaaccaatacagggcctattgtgggaaatgtcaacagccaaggagccttacctggcatggtctggcagaaccgagacgtgtacctgcagggtcccatctgggccaagattcctcacacggacggcaacttccacccttcaccgctaatgggaggatttggactgaagcacccacctcctcagatcctgatcaagaacacgccggtacctgcggatcctccaacgacgttcagccaggcgaaattggcttccttcattacgcagtacagcaccggacaggtcagcgtggaaatcgagtgggagctgcagaaggagaacagcaaacgctggaacccagagattcagtacacttcaaactactacaaatctacaaatgtggactttgctgtcaatacagagggaacttattctgagcctcgccccattggtactcgttacctcacccgtaatctgtaa

SEQ ID NO: 2704 - protein, 738 aa, Artificial Sequence
  Synthetic polypeptide
MAADGYLPDWLEDNLSEGIREWWDLKPGAPKPKANQQKQDDGRGLVLLGYKYLGPFNGLDKGEPVNAADAAALEHDKAYDQQLKAGDNPYLRYNHADAEFQERLQEDTSFGGNLGRAVFQAKKRVLEPLGLVEEAAKTAPGKKRPVEPSPQRSPDSSTGIGKKGQQPAKKRLNFGQTGDSESVPDPQPIGEPPAGPSGLGSGTMAAGGGAPMADNNEGADGVGSSSGNWHCDSTWLGDRVITTSTRTWALPTYNNHLYKQISNGTSGGSTNDNTYFGYSTPWGYFDFNRFHCHFSPRDWQRLINNNWGFRPKRLSFKLFNIQVKEVTQNEGTKTIANNLTSTIQVFTDSEYQLPYVLGSAHQGCLPPFPADVFMIPQYGYLTLNNGSQAVGRSSFYCLEYFPSQMLRTGNNFEFSYTFEDVPFHSGYAHSQSLDRLMNPLIDQYLYYLSRTQSTGGTQGTQQLLFSQAGPANMSAQAKNWLPGPCYRQQRVSTTLSQNNNSNFAWTGATKYHLNGRDSLVNPGVAMATHKDDEERFFPSSGVLMFGKQGAGRDNVDYSSVMLTSEEEIKTTNPVATEQYGVVADNLQQTNTGPIVGNVNSQGALPGMVWQNRDVYLQGPIWAKIPHTDGNFHPSPLMGGFGLKHPPPQILIKNTPVPADPPTTFSQAKLASFITQYSTGQVSVEIEWELQKENSKRWNPEIQYTSNYYKSTNVDFAVNTEGTYSEPRPIGTRYLTRNL

SEQ ID NO: 2705 - protein, 735 aa, Artificial Sequence
  Synthetic polypeptide
MAADGYLPDWLEDTLSEGIRQWWKLKPGPPPPKPAERHKDDSRGLVLPGYKYLGPFNGLDKGEPVNEADAAALEHDKAYDRQLDSGDNPYLKYNHADAEFQERLKEDTSFGGNLGRAVFQAKKRVLEPLGLVEPPVKTAPGKKRPVEHSPAEPDSSSGTGKAGQQPARKRLNFGQTGDADSVPDPQPLGQPPAAPSGLGSTTMATGSGAPMADNNEGADGVGNSSGNWHCDSQWLGDRVITTSTRTWALPTYNNHLYKQISSQSGASNDNHYFGYSTPWGYFDFNRFHCHFSPRDWQRLINNNWGFRPKRLNFKLFNIQVKEVTQNDGTTTIANNLTSTVQVFTDSEYQLPYVLGSAHQGCLPPFPADVFMVPQYGYLTLNNGSQAVGRSSFYCLEYFPSQMLRTGNNFQFSYTFEDVPFHSSYAHSQSLDRLMNPLIDQYLYYLNKTQSNSGTLQQSRLLFSQAGPTSMSLQAKNWLPGPCYRQQRLSKQANDNNNSNFPWTAATKYHLNGRDSLVNPGPAMASHKDDEEKFFPMHGTLIFGKQGTNANDADLDNVMITDEEEIRTTNPVATEQYGYVSNNLQNSNTGPTTGTVNHQGALPGMVWQDRDVYLQGPIWAKIPHTDGHFHPSPLMGGFGLKHPPPQIMIKNTPVPANPPTNFSSAKFASFITQYSTGQVSVEIEWELQKENSKRWNPEIQYTSNYNKSVNVDFTVDTNGVYSEPRPIGTRYLTRNL

SEQ ID NO: 2706 - protein, 735 aa, Artificial Sequence
  Synthetic polypeptide
MAADGYLPDWLEDTLSEGIRQWWKLKPGPPPPKPAERHKDDSRGLVLPGYKYLGPFNGLDKGEPVNEADAAALEHDKAYDRQLDSGDNPYLKYNHADAEFQERLKEDTSFGGNLGRAVFQAKKRVLEPLGLVEGPVKTAPGKKRPVEHSPAEPDSSSGTGKAGQQPARKRLNFGQTGDADSVPDPQPLGQPPAAPSGLGSTTMATGSGAPMADNNEGADGVGNSSGNWHCDSQWLGDRVITTSTRTWALPTYNNHLYKQISSQSGASNDNHYFGYSTPWGYFDFNRFHCHFSPRDWQRLINNNWGFRPKRLNFKLFNIQVKEVTQNDGTTTIANNLTSTVQVFTDSEYQLPYVLGSAHQGCLPPFPADVFMVPQYGYLTLNNGSQAVGRSSFYCLEYFPSQMLRTGNNFQFSYTFEDVPFHSSYAHSQSLDRLMNPLIDQYLYYLNKTQSNSGTLQQSRLLFSQAGPTSMSLQAKNWLPGPCYRQQRLSKQANDNNNSNFPWTAATKYHLNGRDSLVNPGPAMASHKDDEEKFFPMHGTLIFGKQGTNANDADLDNVMITDEEEIRTTNPVATEQYGYVSNNLQNSNTGPTTGTVNHQGALPGMVWQDRDVYLQGPIWAKIPHTDGHFHPSPLMGGFGLKHPPPQIMIKNTPVPANPPTNFSSAKFASFITQYSTGQVSVEIEWELQKENSKRWNPEIQYTSNYNKSVNVDFTVDTNGVYSEPRPIGTRYLTRNL

SEQ ID NO: 2707 - DNA, 2208 bp, Artificial Sequence
  Synthetic polynucleotide
atggctgccgatggttatcttccagattggctcgaggacactctctctgaaggaataagacagtggtggaagctcaaacctggcccaccaccaccaaagcccgcagagcggcataaggacgacagcaggggtcttgtgcttcctgggtacaagtacctcggacccttcaacggactcgacaagggggagccggtcaacgaggcagacgccgcggccctcgagcacgacaaggcctacgaccggcagctcgacagcggagacaacccgtacctcaagtacaaccacgccgacgcggagtttcaggagcgtcttaaagaagatacgtcttttgggggcaacctcggacgagcagtcttccaggcgaaaaagagggttcttgaacctctgggcctggttgagggacctgttaagacggctccgggaaaaaagaggccggtagagcactctcctgcggagccagactcctcctcgggaaccggaaaagcgggccagcagcctgcaagaaaaagattgaattttggtcagactggagacgcagactccgtacctgacccccagcctctcggacagccaccagcagccccctctggtttgggatctactacaatggctacaggcagtggcgcaccaatggcagacaataacgagggtgccgatggagtgggtaattcctcaggaaattggcattgcgattcccaatggctgggcgacagagtcatcaccaccagcacccgaacctgggccctgcccacctacaacaaccacctctacaagcaaatctcaagccaatcaggagcctcaaacgacaaccactactttggctacagcaccccttgggggtattttgacttcaacagattccactgccacttttcaccacgtgactggcaaagactcatcaacaacaactggggattccgacccaagagactcaacttcaagctctttaacattcaagtcaaagaggtcacgcagaatgacggtacgacgacgattgccaataaccttaccagcacggttcaggtgtttactgactcggagtaccagctcccgtacgtcctcgggtcggcgcatcaaggatgcctcccgccgtttccagcggacgtcttcatggtcccacagtatggatacctcaccctgaacaacgggagtcaggcggtaggacgctcttccttttactgcctggagtactttccttctcagatgcttcgtactggaaacaactttcagttcagctacacctttgaagacgttcctttccacagcagctacgctcacagccagagtctggatcggctgatgaatcctctgatcgaccagtacctgtattatctgaacaaaacacaatcaaatagtggaactcttcagcagtctcggctactgtttagtcaagctggacccaccagcatgtctcttcaagctaaaaactggctacctggaccttgctacagacagcagcgtctgtcaaagcaggcaaacgacaacaacaacagcaactttccctggactgcggctacaaagtatcacctaaatggccgggactcgttggttaatccaggaccagctatggccagtcacaaagacgatgaagaaaagtttttccccatgcatggaaccctgatatttggtaaacaaggaacaaatgctaacgacgcggatttggacaatgtcatgattacagatgaagaagaaatccgcaccaccaatcccgtggctacggagcagtacggatatgtgtcaaataatttgcaaaactcaaatactggtccaactactggaactgtcaatcaccaaggagcgttacctggcatggtgtggcaggatcgagacgtgtacctgcagggacccatttgggccaagattcctcacaccgatggacactttcatccttctccactgatgggaggttttgggctcaaacacccgcctcctcagatcatgatcaaaaacactcccgttccagccaatcctcccacaaacttcagttctgccaagtttgcttctttcatcacacagtattccacggggcaggtcagcgtggagatcgagtgggagctgcagaaagagaacagcaaacgctggaatcccgaaattcagtacacttccaactacaacaaatctgttaatgtggactttactgtggacactaatggcgtgtattcagagcctcgccccattggcaccagatacctgactcgtaatctgtaa

SEQ ID NO: 2708 - DNA, 2211 bp, Artificial Sequence; identical to SEQ ID NO: 2389
  Synthetic polynucleotide

SEQ ID NO: 2709 - DNA, 2208 bp, Artificial Sequence
  Synthetic polynucleotide
atggctgccgatggttatcttccagattggctcgaggacactctctctgaaggaacaagacagtggtggaagctcaaacctggcccaccaccaccaaagcccgcagagcggcataaggacgacagcaggggtcttgtgcttcctgggtacaagtacctcggacccttcaacggactcgacaagggggagccggtcaacgaggcagacgccgcggccctcgagcacgacaaggcctacgaccggcagctcgacagcggagacaacccgtacctcaagtacaaccacgccgacgcggagtttcaggagcgtcttaaagaagatacgtcttttgggggcaacctcggacgagcagtcttccaggcgaaaaagagggttcttgaacctctgggcctggttgaggaacctgttaagacggctccgggaaaaaagaggccggtagagcactctcctgcggagccagactcctcctcgggaaccggaaaagcgggccagcagcctgcaagaaaaagattgaattttggtcagactggagacgcagactccgtacctgacccccagcctctcggacagccaccagcagccccctctggtttgggatctactacaatggctacaggcagtggcgcaccaatggcagacaataacgagggtgccgatggagtgggtaattcctcaggaaattggcattgcgattcccaatggctgggcgacagagtcatcaccaccagcacccgaacctgggccctgcccacctacaacaaccacctctacaagcaaatctcaagccaatcaggagcctcaaacgacaaccactactttggctacagcaccccttgggggtattttgacttcaacagattccactgccacttttcaccacgtgactggcaaagactcatcaacaacaactggggattccgacccaagagactcaacttcaagctctttaacattcaagtcaaagaggtcacgcagaatgacggtacgacgacgattgccaataaccttaccagcacggttcaggtgtttactgactcggagtaccagctcccgtacgtcctcgggtcggcgcatcaaggatgcctcccgccgtttccagcggacgtcttcatggtcccacagtatggatacctcaccctgaacaacgggagtcaggcggtaggacgctcttccttttactgcctggagtactttccttctcagatgcttcgtactggaaacaactttcagttcagctacacctttgaagacgttcctttccacagcagctacgctcacagccagagtctggatcggctgatgaatcctctgatcgaccagtacctgtattatctgaacaaaacacaatcaaatagtggaactcttcagcagtctcggctactgtttagtcaagctggacccaccagcatgtctcttcaagctaaaaactggctacctggaccttgctacagacagcagcgtctgtcaaagcaggcaaacgacaacaacaacagcaactttccctggactgcggctacaaagtaccacctaaatggccgggactcgttggttaatccaggaccagctatggccagtcacaaagacgatgaagaaaagtttttccccatgcatggaaccctgatatttggtaaacaaggaacaaatgctaacgacgcggatttggacaatgtcatgattacagatgaagaagaaatccgcaccaccaatcccgtggctacggagcagtacggatatgtgtcaaataatttgcaaaactcaaatactggtccaactactggaactgtcaatcaccaaggagcgttacctggcatggtgtggcaggatcgagacgtgtacctgcagggacccatttgggccaagattcctcacaccgatggacactttcatccttctccactgatgggaggttttgggctcaaacacccgcctcctcagatcatgatcaaaaacactcccgttccagccaatcctcccacaaacttcagttctgccaagtttgcttctttcatcacacagtattccacggggcaggtcagcgtggagatcgagtgggagctgcagaaagagaacagcaaacgctggaatcccgaaattcagtacacttccaactacaacaaatctgttaatgtggactttactgtggacactaatggcgtgtattcagagcctcgccccattggcaccagatacctgactcgtaatctgtaa

SEQ ID NO: 2710 - DNA, 2217 bp, Artificial Sequence
  Synthetic polynucleotide
atggctgctgacggttatcttccagattggctcgaggacaacctctctgagggcattcgcgagtggtgggacctgaaacctggagcccccaagcccaaggccaaccagcagaagcaggacgacggccggggtctggtgcttcctggctacaagtacctcggacccttcaacggactcgacaagggggagcccgtcaacgcggcggacgcagcggccctcgagcacgacaaggcctacgaccagcagctcaaagcgggtgacaatccgtacctgcggtataaccacgccgacgccgagtttcaggagcgtctgcaagaagatacgtcttttgggggcaacctcgggcgagcagtcttccaggccaagaagcgggttctcgaacctctcggtctggttgaggaagctgctaagacggctcctggaaagaagagaccggtagaaccgtcacctcagcgttcccccgactcctccacgggcatcggcaagaaaggccagcagcccgctaaaaagagactgaactttggtcagactggcgactcagagtcagtccccgaccctcaaccaatcggagaaccacctgcaggcccctctggtctgggatctggtacaatggctgcaggcggtggcgctccaatggcagacaataacgaaggcgccgacggagtgggtagttcctcaggaaattggcattgcgattccacatggctgggcgacagagtcatcaccaccagcacccgaacctgggccctgcccacctacaacaaccacctctacaagcaaatatccaatgggacatcgggagggagcaccaacgacaacacctacttcggctacagcaccccctgggggtattttgacttcaacagattccactgccacttctcaccacgtgactggcagcgactcatcaacaacaactggggattccggccaaaaagactcagcttcaagctcttcaacatccaggtcaaggaggtcacgcagaatgaaggcaccaagaccatcgccaataaccttaccagcacgattcaggtatttacggactcggaataccagctgccgtacgtcctcggctccgcgcaccagggctgcctgcctccgttcccggcggacgtcttcatgattccccagtacggctaccttacactgaacaatggaagtcaagccgtaggccgttcctccttctactgcctggaatattttccatctcaaatgctgcgaactggaaacaattttgaattcagctacaccttcgaggacgtgcctttccacagcagctacgcacacagccagagcttggaccgactgatgaatcctctcatcgaccagtacctgtactacttatccagaactcagtccacaggaggaactcaaggtacccagcaattgttattttctcaagctgggcctgcaaacatgtcggctcaggctaagaactggctacctggaccttgctaccggcagcagcgagtctctacgacactgtcgcaaaacaacaacagcaactttgcttggactggtgccaccaaatatcacctgaacggaagagactctttggtaaatcccggtgtcgccatggcaacccacaaggacgacgaggaacgcttcttcccgtcgagtggagtcctgatgtttggaaaacagggtgctggaagagacaatgtggactacagcagcgttatgctaaccagcgaagaagaaattaaaaccactaaccctgtagccacagaacaatacggtgtggtggctgacaacttgcagcaaaccaatacagggcctattgtgggaaatgtcaacagccaaggagccttacctggcatggtctggcagaaccgagacgtgtacctgcagggtcccatctgggccaagattcctcacacggacggcaactgccacccttcaccgctaatgggaggatttggactgaagcacccacctcctcagatcctgatcaagaacacgccggtacctgcggatcctccaacaacgttcagccaggcgaaattggcttccttcattacgcagtacagcaccggacaggtcagcgtggaaatcgagtgggagctgcagaaggagaacagcaaacgctggaacccagagattcagtacacttcaaactactacaaatctacaaatgtggactttgctgtcaatacagagggaacttattctgagcctcgccccattggtactcgttacctcacccgtaatctgtaa

SEQ ID NO: 2711 - protein, 735 aa, Artificial Sequence
  Synthetic polypeptide
MAADGYLPDWLEDTLSEGTRQWWKLKPGPPPPKPAERHKDDSRGLVLPGYKYLGPFNGLDKGEPVNEADAAALEHDKAYDRQLDSGDNPYLKYNHADAEFQERLKEDTSFGGNLGRAVFQAKKRVLEPLGLVEEPVKTAPGKKRPVEHSPAEPDSSSGTGKAGQQPARKRLNFGQTGDADSVPDPQPLGQPPAAPSGLGSTTMATGSGAPMADNNEGADGVGNSSGNWHCDSQWLGDRVITTSTRTWALPTYNNHLYKQISSQSGASNDNHYFGYSTPWGYFDFNRFHCHFSPRDWQRLINNNWGFRPKRLNFKLFNIQVKEVTQNDGTTTIANNLTSTVQVFTDSEYQLPYVLGSAHQGCLPPFPADVFMVPQYGYLTLNNGSQAVGRSSFYCLEYFPSQMLRTGNNFQFSYTFEDVPFHSSYAHSQSLDRLMNPLIDQYLYYLNKTQSNSGTLQQSRLLFSQAGPTSMSLQAKNWLPGPCYRQQRLSKQANDNNNSNFPWTAATKYHLNGRDSLVNPGPAMASHKDDEEKFFPMHGTLIFGKQGTNANDADLDNVMITDEEEIRTTNPVATEQYGYVSNNLQNSNTGPTTGTVNHQGALPGMVWQDRDVYLQGPIWAKIPHTDGHFHPSPLMGGFGLKHPPPQIMIKNTPVPANPPTNFSSAKFASFITQYSTGQVSVEIEWELQKENSKRWNPEIQYTSNYNKSVNVDFTVDTNGVYSEPRPIGTRYLTRNL

SEQ ID NO: 2712 - DNA, 2208 bp, Artificial Sequence
  Synthetic polynucleotide
atggctgccgatggttatcttccagattggctcgaggacactctctctgaaggaataagacagtggtggaagctcaaacctggcccaccaccaccaaagcccgcagagcggcatcaggacaacagcaggggtcttgtgcttcctgggtacaagtacctcggaccctccaacggactcgacaaaggagagccggtcaacgaggcagacgccgcggccctcgagcacgacaaggcctacgaccggcagctcgacagcggagacaacccgtacctcaagtacaaccacgccgacgcggagtttcaggagcgtcttaaagaagatacgtcttttgggggcaacctcggacgagcagtcttccaggcgaaaaagagggttcttgaacctctgggcctggttgaggaacctgttaagacggctccgggaaaaaagaggccggtagagcactctcctgtggagccagactcctcctcgggaaccggaaaagcgggccatcagcctgcgagaaagagattgaattttggtcagactggagacgcagactccgtacctgacccccagcctctcggacagccaccagcagcccccacaagtttgggatctactacaatggctacaggcagtggcgcaccaatggcagacaataacgagggtgccgatggagtgggtaattcctcaggaaattggcattgcgattcccaatggctgggcgacagagtcatcaccaccagcacccgaacctgggccctgcccacctacaacaaccacctctacaagcaaatctccagccaatcaggagcctcgaacgacaaccactactttggctgcagcaccccctgggggtattttgacttcaacagattccactgtcacttctccccacgtgattggcaaagactcatcaacaacaactggggattccgacccaagagactcaacttcaagctctttaacattcaagtcaaagaggtcacgcagaatgacggtacgacgacgattgccaataaccttaccagcacggttcaggtgtttactgactcggagtacccgctcccgtacgtcctcggctcggcgcatcaaggatgcctcccgccgtttccagcggacgtcttcatggtcccacagtatggatacctcaccctgaacaacgggagtcaggcggtaggacgctcttccttttactgcctggagtactttccttctcagatgctgcgtaccggaaacaactttaccttcagctacacctttgaggacgttcctttccacagcagctacgctcacagccagagtttggaccggctgatgaatcctctgatcgaccagtatctatattatctgaacaggacacaatcaaatagtggaactcttcagcagtctaggctactgtttagccaagctggacccaccagcatgtctcttcaagctaaaaactggctgcctggaccttgctacagacagcagcgtctttcaaagcaggcaaacgacaacaacaacagcaactttccctggactgcggctacaaagtatcatctaaatggccgggactcgttggttaatccaggaccagctatggccagccacaaagacgatgaagaaaagtttttccccatgcatggaaccctgatatttggtaaacaaggaacaaatgctaacgacgcggatttggagcatgttatgattacagatgaagaagaaatcaggaccaccaatcctgtggctacagagcagtacggaaacgtgtcaaataatttgcaaaactcaaatactggtccaactacagaaaatgtcaatcaccagggagcgttacctggtatggtgtggcaggatcgagacgtgtacctgcagggacccatttgggccaagattcctcacaccgacggacactttcacccttctccactgatgggaggttttggactcaaacacccgcctcctcaaatcatgatcaaaaacactcccgttccagccaatcctcccacaaacttcagttctgccaagtttgcttctttcatcacacagtattccacgggccaggtcagcgtggagattgagtgggagctgcagaaggagaacagcaaacgctggaaccccgagatccagtatacttccaactacaacaaatctgttaatgtggactttactgtggacactaatggtgtgtattcagagccttgccccattggcaccagatacctgactcgtaatctgtaa

SEQ ID NO: 2713 - protein, 735 aa, Artificial Sequence
  Synthetic polypeptide
MAADGYLPDWLEDTLSEGIRQWWKLKPGPPPPKPAERHQDNSRGLVLPGYKYLGPSNGLDKGEPVNEADAAALEHDKAYDRQLDSGDNPYLKYNHADAEFQERLKEDTSFGGNLGRAVFQAKKRVLEPLGLVEEPVKTAPGKKRPVEHSPVEPDSSSGTGKAGHQPARKRLNFGQTGDADSVPDPQPLGQPPAAPTSLGSTTMATGSGAPMADNNEGADGVGNSSGNWHCDSQWLGDRVITTSTRTWALPTYNNHLYKQISSQSGASNDNHYFGCSTPWGYFDFNRFHCHFSPRDWQRLINNNWGFRPKRLNFKLFNIQVKEVTQNDGTTTIANNLTSTVQVFTDSEYPLPYVLGSAHQGCLPPFPADVFMVPQYGYLTLNNGSQAVGRSSFYCLEYFPSQMLRTGNNFTFSYTFEDVPFHSSYAHSQSLDRLMNPLIDQYLYYLNRTQSNSGTLQQSRLLFSQAGPTSMSLQAKNWLPGPCYRQQRLSKQANDNNNSNFPWTAATKYHLNGRDSLVNPGPAMASHKDDEEKFFPMHGTLIFGKQGTNANDADLEHVMITDEEEIRTTNPVATEQYGNVSNNLQNSNTGPTTENVNHQGALPGMVWQDRDVYLQGPIWAKIPHTDGHFHPSPLMGGFGLKHPPPQIMIKNTPVPANPPTNFSSAKFASFITQYSTGQVSVEIEWELQKENSKRWNPEIQYTSNYNKSVNVDFTVDTNGVYSEPCPIGTRYLTRNL

SEQ ID NO: 2714 - DNA, 2214 bp, Artificial Sequence
  Synthetic polynucleotide
atggctgccgatggttatcttccagattggctcgaggacaaccttagtgaaggaattcgcgagtggtgggctttgaaacctggagcccctcaacccaaggcaaatcaacaacatcaagacaacgctcgaggtcttgtgcttccgggttacaaataccttggacccggcaacggactcgacaagggggagccggtcaacgcagcagacgcggcggccctcgagcacgacaaggcctacgaccagcagctgcaggcgggtgacaatccgtacctgcggtataaccacgccgacgccgagtttcaggagcgtctgcaagaagatacgtcttttgggggcaaccttggcagagcagtcttccaggccaaaaagaggatccttgagcctcttggtctggttgaggaagcagctaaaacggctcctggaaagaagaggcctgtagatcagtctcctcaggaaccggactcatcatctggtgttggcaaatcgggcaaacagcctgccagaaaaagactaaatttcggtcagactggcgactcagagtcagtcccagaccctcaacctctcggagaaccaccagcagcccccacaagtttgggatctaatacaatggcttcaggcggtggcgcaccaatggcagacaataacgagggtgccgatggggtgggtagttcctcgggaaattggcattgcgattcccaatggctgggggacagagtcatcaccaccagcacccgaacctgggccctgcccacctacaacaatcacctctacaagcaaatctccaacgggacatcgggaggagccaccaacgacaacacctacttcggctacagcaccccctgggggtattttgactttaacagattccactgccacttttcaccacgtgactggcagcgactcatcaacaacaactggggattccggcccaagagactcagcttcaagctcttcaacatccaggtcaaggaggtcacgcagaatgaaggcaccaagaccatcgccaataacctcaccagcaccatccaggtgtttacggactcggagtaccagctgccgtacgttctcggctctgcgcaccagggctgcctccctccgttcccggcggacgtgttcatgattccgcaatacggctacctgacgctcaacaatggcagccaagccgtgggacgttcatccttttactgcctggaatatttcccttctcagatgctgagaacgggcaacaactttaccttcagctacacctttgaggaagtgcctttccacagcagctacgcgcacagccagagcttggaccggctgatgaatcctctgattgaccagtacctgtactacttgtctcggactcaaacaacaggaggcacggcaaatacgcagactctgggcttcagccaaggtgggcctaatacaatggccaatcaggcaaagaactggctgccaggaccctgttaccgccaacaacgcgtctcaacgacaaccgggcaaaacaacaatagcaactttgcctggactgctgggaccaaataccatctgaatggaagaaattcattggctaatcctggcatcgctatggcaacacacaaagacgacgaggagcgtttttttcccagtaacgggatcctgatttttggcaaacaaaatgctgccagagacaatgcggattacagcgatgtcatgctcaccagcgaggaagaaatcaaaaccactaaccctgtggctacagaggaatacggtatcgtggcagataacttgcagcagcaaaacacggctcctcaaattggaactgtcaacagccagggggccttacccggtatggtctggcagaaccgggacgtgtacctgcagggtcccatctgggccaagattcctcacacggacggcaacttccacccgtctccgctgatgggcggctttggcctgaaacatcctccgcctcagatcctgatcaagaacacgcctgtacctgcggatcctccgaccaccttcaaccagtcaaagctgaactctttcatcacgcaatacagcaccggacaggtcagcgtggagatcgagtgggagctgcagaaggaaaacagcaagcgctggaacccggagatccagtacacttccaactattacaagtctaataatgttgaatttgctgttaatactgaaggtgtatatagtgaaccccgccccattggcaccagatacctgactcgtaatctgtaa

SEQ ID NO: 2715 - protein, 737 aa, Artificial Sequence
  Synthetic polypeptide
MAADGYLPDWLEDNLSEGIREWWALKPGAPQPKANQQHQDNARGLVLPGYKYLGPGNGLDKGEPVNAADAAALEHDKAYDQQLQAGDNPYLRYNHADAEFQERLQEDTSFGGNLGRAVFQAKKRILEPLGLVEEAAKTAPGKKRPVDQSPQEPDSSSGVGKSGKQPARKRLNFGQTGDSESVPDPQPLGEPPAAPTSLGSNTMASGGGAPMADNNEGADGVGSSSGNWHCDSQWLGDRVITTSTRTWALPTYNNHLYKQISNGTSGGATNDNTYFGYSTPWGYFDFNRFHCHFSPRDWQRLINNNWGFRPKRLSFKLFNIQVKEVTQNEGTKTIANNLTSTIQVFTDSEYQLPYVLGSAHQGCLPPFPADVFMIPQYGYLTLNNGSQAVGRSSFYCLEYFPSQMLRTGNNFTFSYTFEEVPFHSSYAHSQSLDRLMNPLIDQYLYYLSRTQTTGGTANTQTLGFSQGGPNTMANQAKNWLPGPCYRQQRVSTTTGQNNNSNFAWTAGTKYHLNGRNSLANPGIAMATHKDDEERFFPSNGILIFGKQNAARDNADYSDVMLTSEEEIKTTNPVATEEYGIVADNLQQQNTAPQIGTVNSQGALPGMVWQNRDVYLQGPIWAKIPHTDGNFHPSPLMGGFGLKHPPPQILIKNTPVPADPPTTFNQSKLNSFITQYSTGQVSVEIEWELQKENSKRWNPEIQYTSNYYKSNNVEFAVNTEGVYSEPRPIGTRYLTRNL

SEQ ID NO: 2716 - DNA, 2211 bp, Artificial Sequence
  Synthetic polynucleotide
atggctgccgatggttatcttccagattggctcgaggacaacctctctgagggcattcgcgagtggtgggacttgaaacctggagccccgaagcccaaagccaaccagcaaaagcaggacgacggccggggtctggtgcttcctggctacaagtacctcggacccttcaacggactcgacaagggggagcccgtcaacgcggcggacgcagcggccctcgagcacgacaaggcctacgaccagcagctcaaagcgggtgacaatccgtacctgcggtataaccacgccgacgccgagtttcaggagcgtctgcaagaagatacgtcttttgggggcaacctcgggcgagcagtcttccaggccaagaagcgggttctcgaacctctcggtctggttgaggaaggcgctaagacggctcctggaaagaaacgtccggtagagcagtcgccacaagagccagactcctcctcgggcatcggcaagacaggccagcagcccgctaaaaagagactcaattttggtcagactggcgactcagagtcagtccccgacccacaacctctcggagaacctccagcaacccccgctgctgtgggacctactacaatggcttcaggcggtggcgcaccaatggcagacaataacgaaggcgccgacggagtgggtaatgcctcaggaaattggcattgcgattccacatggctgggcgacagagtcatcaccaccagcacccgaacatgggccttgcccacctataacaaccacctctacaagcaaatctccagtgcttcaacgggggccagcaacgacaaccactacttcggctacagcaccccctgggggtattttgatttcaacagattccactgccatttctcaccacgtgactggcagcgactcatcaacaacaattggggattccggcccaagagactcaacttcaagctcttcaacatccaagtcaaggaggtcacgacgaatgatggcgtcacgaccatcgctaataaccttaccagcacggttcaagtcttctcggactcggagtaccagctgccgtacgttctcggctctgcccaccagggctgcctgcctccgttcccggcggacgtgttcatgattccccagtacggctacctaacactcaacaacggtagtcaggccgtgggacgctcctccttctactgcctggaatactttccttcgcagatgctgagaaccggcaacaacttccagtttacttacaccttcgaggacgtgcctttccacagcagctacgcccacagccagagcttggaccggctgatgaatcctctgattgaccagtacctgtactacttgtctcggactcaaacaacaggaggcacggcaaatacgcagactctgggcttcagccaaggtgggcctaatacaatggccaatcaggcaaagaactggctgccaggaccctgttaccgccaacaacgcgtctcaacgacaaccgggcaaaacaacaatagcaattttacctggactggtgcttcaaaatataacctcaatgggcgtgaatccatcatcaaccctggcactgctatggcctcacacaaagacgacgaagacaagttctttcccatgagcggtgtcatgatttttggaaaagagagcgccggagcttcaaacactgcattggacaatgtcatgattacagacgaagaggaaattaaagccactaaccctgtggccaccgaaagatttgggaccgtggcagtcaatttccagagcagcagcacagaccctgcgaccggagatgtgcatgctatgggagcattacctggcatggtgtggcaagatagagacgtgtacctgcagggtcccatttgggccaaaattcctcacacagatggacactttcacccgtctcctcttatgggcggctttggactcaagaacccgcctcctcagatcctcatcaaaaacacgcctgttcctgcgaatcctccggcggagttttcagctacaaagtttgcttcattcatcacccaatactccacaggacaagtgagtgtggaaattgaatgggagctgcagaaagaaaacagcaagcgctggaatcccgaagtgcagtacacatccaattatgcaaaatctgccaacgttgattttactgtggacaacaatggactttatactgagcctcgccccattggcacccgttacctcacccgtcccctgtaa

SEQ ID NO: 2717 - protein, 736 aa, Artificial Sequence
  Synthetic polypeptide
MAADGYLPDWLEDNLSEGIREWWDLKPGAPKPKANQQKQDDGRGLVLPGYKYLGPFNGLDKGEPVNAADAAALEHDKAYDQQLKAGDNPYLRYNHADAEFQERLQEDTSFGGNLGRAVFQAKKRVLEPLGLVEEGAKTAPGKKRPVEQSPQEPDSSSGIGKTGQQPAKKRLNFGQTGDSESVPDPQPLGEPPATPAAVGPTTMASGGGAPMADNNEGADGVGNASGNWHCDSTWLGDRVITTSTRTWALPTYNNHLYKQISSASTGASNDNHYFGYSTPWGYFDFNRFHCHFSPRDWQRLINNNWGFRPKRLNFKLFNIQVKEVTTNDGVTTIANNLTSTVQVFSDSEYQLPYVLGSAHQGCLPPFPADVFMIPQYGYLTLNNGSQAVGRSSFYCLEYFPSQMLRTGNNFQFTYTFEDVPFHSSYAHSQSLDRLMNPLIDQYLYYLSRTQTTGGTANTQTLGFSQGGPNTMANQAKNWLPGPCYRQQRVSTTTGQNNNSNFTWTGASKYNLNGRESIINPGTAMASHKDDEDKFFPMSGVMIFGKESAGASNTALDNVMITDEEEIKATNPVATERFGTVAVNFQSSSTDPATGDVHAMGALPGMVWQDRDVYLQGPIWAKIPHTDGHFHPSPLMGGFGLKNPPPQILIKNTPVPANPPAEFSATKFASFITQYSTGQVSVEIEWELQKENSKRWNPEVQYTSNYAKSANVDFTVDNNGLYTEPRPIGTRYLTRPL

SEQ ID NO: 2718 - DNA, 2211 bp, Artificial Sequence
  Synthetic polynucleotide
atggctgctgacggttatcttccagattggctcgaggacaacctttctgaaggcattcgagagtggtgggcgctgcaacctggagcccctaaacccaaggcaaatcaacaacatcaggacaacgctcggggtcttgtgcttccgggttacaaatacctcggacccggcaacggactcgacaagggggaacccgtcaacgcagcggacgcggcagccctcgagcacgacaaggcctacgaccagcagctcaaggccggtgacaacccctacctcaagtacaaccacgccgacgccgagttccaggagcggctcaaagaagatacgtcttttgggggcaacctcgggcgagcagtcttccaggccaaaaagaggcttcttgaacctcttggtctggttgaggaagcggctaagacggctcctggaaagaagaggcctgtagatcagtctcctcaggaaccggactcatcatctggtgttggcaaatcgggcaaacagcctgccagaaaaagactaaatttcggtcagactggcgactcagagtcagtcccagaccctcaacctctcggagaaccaccagcagcccccacaagtttgggatctaatacaatggcttcaggcggtggcgcaccaatggcagacaataacgagggtgccgatggagtgggtaattcctcaggaaattggcattgcgattcccaatggctgggcgacagagtcatcaccaccagcaccagaacctgggccctgcccacttacaacaaccatctctacaagcaaatctccagccaatcaggagcttcaaacgacaaccactactttggctacagcaccccttgggggtattttgactttaacagattccactgccacttctcaccacgtgactggcagcgactcattaacaacaactggggattccggcccaagaaactcagcttcaagctcttcaacatccaagttaaagaggtcacgcagaacgatggcacgacgactattgccaataaccttaccagcacggttcaagtgtttacggactcggagtatcagctcccgtacgtgctcgggtcggcgcaccaaggctgtctcccgccgtttccagcggacgtcttcatggtccctcagtatggatacctcaccctgaacaacggaagtcaagcggtgggacgctcatccttttactgcctggagtacttcccttcgcagatgctaaggactggaaataacttccaattcagctataccttcgaggatgtaccttttcacagcagctacgctcacagccagagtttggatcgcttgatgaatcctcttattgatcagtatctgtactacctgaacagaacgcaaggaacaacctctggaacaaccaaccaatcacggctgctttttagccaggctgggcctcagtctatgtctttgcaggccagaaattggctacctgggccctgctaccggcaacagagactttcaaagactgctaacgacaacaacaacagtaactttccttggacagcggccagcaaatatcatctcaatggccgcgactcgctggtgaatccaggaccagctatggccagtcacaaggacgatgaagaaaaatttttccctatgcacggcaatctaatatttggcaaagaagggacaacggcaagtaacgcagaattagataatgtaatgattacggatgaagaagagattcgtaccaccaatcctgtggcaacagagcagtatggaactgtggcaaataacttgcagagctcaaatacagctcccacgactagaactgtcaatgatcagggggccttacctggcatggtgtggcaagatcgtgacgtgtaccttcaaggacctatctgggcaaagattcctcacacggatggacactttcatccttctcctctgatgggaggctttggactgaaacatccgcctcctcaaatcatgatcaaaaatactccggtaccggcaaatcctccgacgactttcagcccggccaagtttgcttcatttatcactcagtactccactggacaggtcagcgtggaaattgagtgggagctacagaaagaaaacagcaaacgttggaatccagagattcagtacacttccaactacaacaagtctgttaatgtggactttactgtagacactaatggtgtttatagtgaacctcgccccattggcacccgttaccttacccgtcccctgtaa

SEQ ID NO: 2719 - protein, 736 aa, Artificial Sequence
  Synthetic polypeptide
MAADGYLPDWLEDNLSEGIREWWALQPGAPKPKANQQHQDNARGLVLPGYKYLGPGNGLDKGEPVNAADAAALEHDKAYDQQLKAGDNPYLKYNHADAEFQERLKEDTSFGGNLGRAVFQAKKRLLEPLGLVEEAAKTAPGKKRPVDQSPQEPDSSSGVGKSGKQPARKRLNFGQTGDSESVPDPQPLGEPPAAPTSLGSNTMASGGGAPMADNNEGADGVGNSSGNWHCDSQWLGDRVITTSTRTWALPTYNNHLYKQISSQSGASNDNHYFGYSTPWGYFDFNRFHCHFSPRDWQRLINNNWGFRPKKLSFKLFNIQVKEVTQNDGTTTIANNLTSTVQVFTDSEYQLPYVLGSAHQGCLPPFPADVFMVPQYGYLTLNNGSQAVGRSSFYCLEYFPSQMLRTGNNFQFSYTFEDVPFHSSYAHSQSLDRLMNPLIDQYLYYLNRTQGTTSGTTNQSRLLFSQAGPQSMSLQARNWLPGPCYRQQRLSKTANDNNNSNFPWTAASKYHLNGRDSLVNPGPAMASHKDDEEKFFPMHGNLIFGKEGTTASNAELDNVMITDEEEIRTTNPVATEQYGTVANNLQSSNTAPTTRTVNDQGALPGMVWQDRDVYLQGPIWAKIPHTDGHFHPSPLMGGFGLKHPPPQIMIKNTPVPANPPTTFSPAKFASFITQYSTGQVSVEIEWELQKENSKRWNPEIQYTSNYNKSVNVDFTVDTNGVYSEPRPIGTRYLTRPL

SEQ ID NO: 2720 - DNA, 2211 bp, Artificial Sequence
  Synthetic polynucleotide
atggctgccgatggttatcttccagattggctcgaggacaaccttagtgaaggaattcgcgagtggtgggctttgaaacctggagcccctcaacccaaggcaaatcaacaacatcaagacaacgctcgaggtcttgtgcttccgggttacaaataccttggacccggcaacggactcgacaagggggagccggtcaacgcagcagacgcggcggccctcgagcacgacaaggcctacgaccagcagctcaaggccggagacaacccgtacctcaagtacaaccacgccgacgccgagttccaggagcggctcaaagaagatacgtcttttgggggcaacctcgggcgagcagtcttccaggccaaaaagaggcttcttgaacctcttggtctggttgaggaagcggctaagacggctcctggaaagaagagaccggtagagccatcaccccagcgttctccagactcctctacgggcatcggcaagaaaggccaacagcccgctaaaaagagactcaattttggtcagactggcgactcagagtcagtccccgacccacaacctctcggagaacctccagcaacccccgctgctgtgggacctactacaatggcttcaggcggtggcgcaccaatggcagacaataacgagggtgccgatggagtgggtaattcctcaggaaattggcattgcgattcccaatggctgggcgacagagtcatcaccaccagcaccagaacctgggccctgcccacttacaacaaccatctctacaagcaaatctccagccaatcaggagcttcaaacgacaaccactactttggctacagcaccccttgggggtattttgactttaacagattccactgccacttttcaccacgtgactggcaaagactcatcaacaacaactggggattccgacccaagagactcaacttcaagctcttcaacatccaagtcaaggaggtcacgacgaatgatggcgtcacgaccatcgctaataaccttaccagcacggttcaagtcttctcggactcggagtaccagttgccgtacgtcctcggctctgcgcaccagggctgcctccctccgttcccggcggacgtgttcatgattccgcagtacggctacctaacgctcaacaatggcagccaagccgtgggacgttcatccttttactgcctggaatatttcccttctcagatgctgagaacgggcaacaactttaccttcagctacacttttgaggacgttcctttccacagcagctacgctcacagccagagtctggaccgtctcatgaatcctctcatcgaccagtacctgtattacttgagcagaacaaacactccaagtggaaccaccacgcagtcaaggcttcagttttctcaggccggagcgagtgacattcgggaccagtctaggaactggcttcctggaccctgttaccgccagcagcgcgtttctaaaacaaaaacagacaacaacaacagcaattttacctggactggtgcttcaaaatataaccttaatgggcgtgaatctataatcaaccctggcactgctatggcctcacacaaagacgacgaagacaagttctttcccatgagcggtgtcatgatttttggaaaagagagcgccggagcttcaaacactgcattggacaatgtcatgattacagacgaagaggaaattaaagccactaaccctgtggccaccgaaagatttgggaccgtggcagtcaatttccagagcagcagcacagaccctgcgaccggagatgtgcatgttatgggagccttacctggaatggtgtggcaagacagagacgtatacctgcagggtcctatttgggccaaaattcctcacacggatggacactttcacccgtctcctcttatgggcggctttggactcaagaacccgcctcctcagatcctcatcaaaaacacgcctgttcctgcgaatcctccggcggagttttcagctacaaagtttgcttcattcatcacccaatactccacaggacaagtgagtgtggaaattgaatgggagctgcagaaagaaaacagcaagcgctggaatcccgaagtgcagtacacatccaattatgcaaaatctgccaacgttgattttactgtggacaacaatggactttatactgagcctcgccccattggcacccgttaccttacccgtcccctgtaa

SEQ ID NO: 2721 - protein, 736 aa, Artificial Sequence
  Synthetic polypeptide
MAADGYLPDWLEDNLSEGIREWWALKPGAPQPKANQQHQDNARGLVLPGYKYLGPGNGLDKGEPVNAADAAALEHDKAYDQQLKAGDNPYLKYNHADAEFQERLKEDTSFGGNLGRAVFQAKKRLLEPLGLVEEAAKTAPGKKRPVEPSPQRSPDSSTGIGKKGQQPAKKRLNFGQTGDSESVPDPQPLGEPPATPAAVGPTTMASGGGAPMADNNEGADGVGNSSGNWHCDSQWLGDRVITTSTRTWALPTYNNHLYKQISSQSGASNDNHYFGYSTPWGYFDFNRFHCHFSPRDWQRLINNNWGFRPKRLNFKLFNIQVKEVTTNDGVTTIANNLTSTVQVFSDSEYQLPYVLGSAHQGCLPPFPADVFMIPQYGYLTLNNGSQAVGRSSFYCLEYFPSQMLRTGNNFTFSYTFEDVPFHSSYAHSQSLDRLMNPLIDQYLYYLSRTNTPSGTTTQSRLQFSQAGASDIRDQSRNWLPGPCYRQQRVSKTKTDNNNSNFTWTGASKYNLNGRESIINPGTAMASHKDDEDKFFPMSGVMIFGKESAGASNTALDNVMITDEEEIKATNPVATERFGTVAVNFQSSSTDPATGDVHVMGALPGMVWQDRDVYLQGPIWAKIPHTDGHFHPSPLMGGFGLKNPPPQILIKNTPVPANPPAEFSATKFASFITQYSTGQVSVEIEWELQKENSKRWNPEVQYTSNYAKSANVDFTVDNNGLYTEPRPIGTRYLTRPL

SEQ ID NO: 2722 - DNA, 2211 bp, Artificial Sequence
  Synthetic polynucleotide
atggctgccgatggttatcttccagattggctcgaggacaacctctctgagggcattcgcgagtggtgggacttgaaacctggagcccctaaacccaaggcaaatcaacaacatcaggacaacgctcgaggtcttgtgcttccgggttacaaataccttggacccggcaacggactcgacaagggggagccggtcaacgcagcagacgcggcggccctcgagcacgacaaggcctacgaccagcagctcaaggccggagacaacccgtacctcaagtacaaccacgccgacgccgagttccaggagcggctcaaagaagatacgtcttttgggggcaacctcgggcgagcagtcttccaggccaaaaagaggcttcttgaacctcttggtctggttgaggaagcggctaagacggctcctggaaagaagagaccggtagagccatcaccccagcgttctccagactcctctacgggcatcggcaagaaaggccaacagcccgctaaaaagagactcaattttggtcagactggcgactcagagtcagtccccgacccacaacctctcggagaacctccagcaacccccgctgctgtgggacctactacaatggcttcaggcggtggcgcaccaatggcagacaataacgagggtgccgatggagtgggtaattcctcaggaaattggcattgcgattcccaatggctgggcgacagagtcatcaccaccagcaccagaacctgggccctgcccacttacaacaaccatctctacaagcaaatctccagccaatcaggagcttcaaacgacaaccactactttggctacagcaccccttgggggtattttgactttaacagattccactgccacttttcaccacgtgactggcaaagactcatcaacaacaactggggattccgacccaagagactcaacttcaagctcttcaacatccaagtcaaggaggtcacgacgaatgatggcgtcacgaccatcgctaataaccttaccagcacggttcaagtcttctcggactcggagtaccagttgccgtacgtcctcggctctgcgcaccagggctgcctccctccgttcccggcggacgtgttcatgattccgcagtacggctacctaacgctcaacaatggcagccaagccgtgggacgttcatccttttactgcctggaatatttcccttctcagatgctgagaacgggcaacaactttaccttcagctacacttttgaggacgttcctttccacagcagctacgctcacagccagagtctggaccgtctcatgaatcccctcatcgaccagtacctgtattacttgagcagaacaaacactccaagtggaaccaccacgcagtcaaggcttcagttttctcaggccggagcgagtgacattcgggaccagtctaggaactggcttcctggaccctgttaccggcagcagcgcgtttctaaaacaaaaacagacaacaacaacagcaactttacctggactggtgcttcaaaatataaccttaatgggcgtgaatctataatcaaccctggcactgctatggcctcacacaaagacgacgaagacaagttctttcccatgagcggtgtcatgatttttggaaaggagagcgccggagcttcaaacactgcattggacaatgtcatgatcacagacgaagaggaaatcaaagccactaaccccgtggccaccgaaagatttgggactgtggcagtcaatctccagagcagcagcacagaccctgcgaccggagatgtgcatgttatgggagccttacctggaatggtgtggcaagacagagacgtgtacctgcagggtcctatttgggccaaaattcctcacacggatggacactttcacccgtctcctctcatgggcggctttggacttaagcacccgcctcctcagatcctcatcaaaaacacgcctgttcctgcgaatcctccggcagagttttcggctacaaagtttgcttcattcatcacccagtattccacaggacaagtgagtgtggaaattgaatgggagctgcagaaagaaaacagcaagcgctggaatcccgaagtgcagtacacatccaattatgcaaaatctgccaacgttgattttactgtggacaacaatggactttatactgagcctcgccccattggcacccgttacctcacccgtcccctgtaa

SEQ ID NO: 2723 - protein, 736 aa, Artificial Sequence
  Synthetic polypeptide
MAADGYLPDWLEDNLSEGIREWWDLKPGAPKPKANQQHQDNARGLVLPGYKYLGPGNGLDKGEPVNAADAAALEHDKAYDQQLKAGDNPYLKYNHADAEFQERLKEDTSFGGNLGRAVFQAKKRLLEPLGLVEEAAKTAPGKKRPVEPSPQRSPDSSTGIGKKGQQPAKKRLNFGQTGDSESVPDPQPLGEPPATPAAVGPTTMASGGGAPMADNNEGADGVGNSSGNWHCDSQWLGDRVITTSTRTWALPTYNNHLYKQISSQSGASNDNHYFGYSTPWGYFDFNRFHCHFSPRDWQRLINNNWGFRPKRLNFKLFNIQVKEVTTNDGVTTIANNLTSTVQVFSDSEYQLPYVLGSAHQGCLPPFPADVFMIPQYGYLTLNNGSQAVGRSSFYCLEYFPSQMLRTGNNFTFSYTFEDVPFHSSYAHSQSLDRLMNPLIDQYLYYLSRTNTPSGTTTQSRLQFSQAGASDIRDQSRNWLPGPCYRQQRVSKTKTDNNNSNFTWTGASKYNLNGRESIINPGTAMASHKDDEDKFFPMSGVMIFGKESAGASNTALDNVMITDEEEIKATNPVATERFGTVAVNLQSSSTDPATGDVHVMGALPGMVWQDRDVYLQGPIWAKIPHTDGHFHPSPLMGGFGLKHPPPQILIKNTPVPANPPAEFSATKFASFITQYSTGQVSVEIEWELQKENSKRWNPEVQYTSNYAKSANVDFTVDNNGLYTEPRPIGTRYLTRPL

SEQ ID NO: 2724 - DNA, 2214 bp, Artificial Sequence
  Synthetic polynucleotide
atggctgccgatggttatcttccagattggctcgaggacaaccttagtgaaggaattcgcgagtggtgggctttgaaacctggagcccctcaacccaaggcaaatcaacaacatcaagacaacgctcgaggtcttgtgcttccgggttacaaataccttggacccggcaacggactcgacaagggggagccggtcaacgcagcagacgcggcggccctcgagcacgacaaggcctacgaccagcagctgcaggcgggtgacaatccgtacctgcggtataaccacgccgacgccgagtttcaggagcgtctgcaagaagatacgtcttttgggggcaaccttggcagagcagtcttccaggccaaaaagaggatccttgagcctcttggtctggttgaggaagcagctaaaacggctcctggaaagaagaggcctgtagatcagtctcctcaggaaccggactcatcatctggtgttggcaaatcgggcaaacagcctgccagaaaaagactaaatttcggtcagactggcgactcagagtcagtcccagaccctcaacctctcggagaaccaccagcagcccccacaagtttgggatctaatacaatggcttcaggcggtggcgcaccaatggcagacaataacgagggtgccgatggggtgggtagttcctcgggaaattggcattgcgattcccaatgactgggggacagagtcatcaccaccagcacccgaacctgggccctgcccacctacaacaatcacctctacaagcaaatctccaacgggacatcgggaggagccaccaacgacaacacctacttcggctacagcaccccctgggggtattttgactttaacagattccactgccacttttcaccacgtgactggcagcgactcatcaacaacaactggggattccggcccaagagactcagcttcaagctcttcaacatccaggtcaaggaggtcacgcagaatgaaggcaccaagaccatcgccaataacctcaccagcaccatccaggtgtttacggactcggagtaccagctgccgtacgttctcggctctgcgcaccagggctgcctccctccgttcccggcggacgtgttcatgattccgcaatacggctacctgacgctcaacaatggcagccaagccgtgggacgttcatccttttactgcctggaatatttcccttctcagatgctgagaacgggcaacaactttaccttcagctacacctttgaggaagtgcctttccacagcagctacgcgcacagccagagcttggaccggctgatgaatcctctgattgaccagtacctgtactacttgtctcggactcaaacaacaggaggcacggcaaatacgcagactctgggcttcagccaaggtgggcctaatacaatggccaatcaggcaaagaactggctgccaggaccctgttaccgccaacaacgcgtctcaacgacaaccgggcaaaacaacaatagcaactttgcctggactgctgggaccaaataccatctgaatggaagaaattcattggctaatcctggcatcgctatggcaacacacaaagacgacgaggagcgtttttttcccagtaacgggatcctgatttttggcaaacaaaatgctgccagagacaatgcggattacagcgatgtcatgctcaccagcgaggaagaaatcaaaaccactaaccctgtggctacagaggaatacggtatcgtggcagataacttgcagcagcaaaacacggctcctcaaattggaactgtcaacagccagggggccttacccggtatggtctggcagaaccgggacgtgtacctgcagggtcccatctgggccaagattcctcacacggacggcaacttccacccgtctccgctgatgggcggctttggcctgaaacatcctccgcctcagatcctgatcaagaacacgcctgtacctgcggatcctccgaccaccttcaaccagtcaaagctgaactctttcatcacgcaatacagcaccggacaggtcagcgtggagatcgagtgggagctgcagaaggaaaacagcaagcgctggaacccggagatccagtacacttccaactattacaagtctaataatgttgaatttgctgttaatactgaaggtgtatatagtgaaccccgccccattggcaccagatacctgactcgtaatctgtaa

SEQ ID NO: 2725 - protein, 736 aa, Artificial Sequence
  Synthetic polypeptide
MAADGYLPDWLEDNLSEGIREWWALKPGAPQPKANQQHQDNARGLVLPGYKYLGPGNGLDKGEPVNAADAAALEHDKAYDQQLQAGDNPYLRYNHADAEFQERLQEDTSFGGNLGRAVFQAKKRILEPLGLVEEAAKTAPGKKRPVDQSPQEPDSSSGVGKSGKQPARKRLNFGQTGDSESVPDPQPLGEPPAAPTSLGSNTMASGGGAPMADNNEGADGVGSSSGNWHCDSQLGDRVITTSTRTWALPTYNNHLYKQISNGTSGGATNDNTYFGYSTPWGYFDFNRFHCHFSPRDWQRLINNNWGFRPKRLSFKLFNIQVKEVTQNEGTKTIANNLTSTIQVFTDSEYQLPYVLGSAHQGCLPPFPADVFMIPQYGYLTLNNGSQAVGRSSFYCLEYFPSQMLRTGNNFTFSYTFEEVPFHSSYAHSQSLDRLMNPLIDQYLYYLSRTQTTGGTANTQTLGFSQGGPNTMANQAKNWLPGPCYRQQRVSTTTGQNNNSNFAWTAGTKYHLNGRNSLANPGIAMATHKDDEERFFPSNGILIFGKQNAARDNADYSDVMLTSEEEIKTTNPVATEEYGIVADNLQQQNTAPQIGTVNSQGALPGMVWQNRDVYLQGPIWAKIPHTDGNFHPSPLMGGFGLKHPPPQILIKNTPVPADPPTTFNQSKLNSFITQYSTGQVSVEIEWELQKENSKRWNPEIQYTSNYYKSNNVEFAVNTEGVYSEPRPIGTRYLTRNL

SEQ ID NO: 2726 - DNA, 2214 bp, Artificial Sequence
  Synthetic polynucleotide
atggctgccgatggttatcttccagattggctcgaggacaaccttagtgaaggaattcgcgagtggtgggctttgaaacctggagcccctcaacccaaggcaaatcaacaacatcaagacaacgctcgaggtcttgtgcttccgggttacaaataccttggacccggcaacggactcgacaagggggagccggtcaacgcagcagacgcggcggccctcgagcacgacaaggcctacgaccagcagctgcaggcgggtgacaatccgtacctgcggtataaccacgccgacgccgagtttcaggagcgtctgcaagaagatacgtcttttgggggcaaccttggcagagcagtcttccaggccaaaaagaggatccttgagcctcttggtctggttgaggaagcagctaaaacggctcctggaaagaagaggcctgtagatcagtctcctcaggaaccggactcatcatctggtgttggcaaatcgggcaaacagcctgccagaaaaagactaaatttcggtcagactggcgactcagagtcagtcccagaccctcaacctctcggagaaccaccagcagcccccacaagtttgggatctaatacaatggcttcaggcggtggcgcaccaatggcagacaataacgagggtgccgatggggtgggtagttcctcgggaaattggcattgcgattcccaatggctgggggacagagtcatcaccaccagcacccgaacctgggccctgcccacctacaacaatcacctctacaagcaaatctccaacgggacatcgggaggagccaccaacgacaacacctacttcggctacagcaccccctgggggtattttgactttaacagattccactgccacttttcaccacgtgactggcagcgactcatcaacaacaactggggattccggcccaagagactcagcttcaagctcttcaacatccaggtcaaggaggtcacgcagaatgaaggcaccaagaccatcgccaataacctcaccagcaccatccaggtgtttacggactcggagtaccagctgccgtacgttctcggctctgcgcaccagggctgcctccctccgttcccggcggacgtgttcatgattccgcaatacggctacctgacgctcaacaatggcagccaagccgtgggacgttcatccttttactgcctggaatatttcccttctcagatgctgagaacgggcaacaactttaccttcagctacacctttgaggaagtgccttttcacagcagctacgcgcacagccagagcttggaccggctgatgaatcctctgattgaccagtacctgtactacttgtctcggactcaaacaacaggaggcacggcaaatacgcagactctgggcttcagccaaggtgggcctaatacaatggccaatcaggcaaagaactggctgccaggaccctgttaccgccaacaacgcgtctcaacgacaaccgggcaaaacaacaatagcaactttgcctggactgctgggaccaaataccatctgaatggaagaaattcattggctaatcctggcatcgctatggcaacacacaaagacgacgaggagcgtttttttcccagtaacgggatcctgatttttggcaaacaaaatgctgccagagacaatgcggattacagcgatgtcatgctcaccagcgaggaagaaatcaaaaccactaaccctgtggctacagaggaatacggtatcgtggcagataacttgcagcagcaaaacacggctcctcaaattggaactgtcaacagccagggggccttacccggtatggtctggcagaaccgggacgtgtacctgcagggtcccatctgggccaagattcctcacacggacggcaacttccacccgtctccgctgatgggcggctttggcctgaaacatcctccgcctcagatcctgatcaagaacacgcctgtacctgcggatcctccgaccaccttcaaccagtcaaagctgaactctttcatcacgcaatacagcaccggacaggtcagcgtggagatcgagtgggagctgcagaaggaaaacagcaagcgctggaacccggagatccagtacacttccaactattacaagtctaataatgttgaatttgctgttaatactgaaggtgtatatagtgaaccccgccccattggcaccagatacctgactcgtaatctgtaa

SEQ ID NO: 2727 - protein, 737 aa, Artificial Sequence; identical to SEQ ID NO: 2715
  Synthetic polypeptide

SEQ ID NO: 2728 - DNA, 2211 bp, Artificial Sequence
  Synthetic polynucleotide
atggctgccgatggttatcttccagattggctcgaggacaacctctctgagggcattcgcgagtggtgggacttgaaacctggagcccctaaacccaaggcaaatcaacaacatcaggacaacgctcgaggtcttgtgcttccgggttacaaataccttggacccggcaacggactcgacaagggggagccggtcaacgcagcagacgcggcggccctcgagcacgacaaggcctacgaccagcagctcaaggccggagacaacccgtacctcaagtacaaccacgccgacgccgagttccaggagcggctcaaagaagatacgtcttttgggggcaacctcgggcgagcagtcttccaggccaaaaagaggcttcttgaacctcttggtctggttgaggaagcggctaagacggctcctggaaagaagagaccggtagagccatcaccccagcgttctccagactcctctacgggcatcggcaagaaaggccaacagcccgctaaaaagagactcaattttggtcagactggcgactcagagtcagtccccgacccacaacctctcggagaacctccagcaacccccgctgctgtgggacctactacaatggcttcaggcggtggcgcaccaatggcagacaataacgagggtgccgatggagtgggtaattcctcaggaaattggcattgcgattcccaatggctgggcgacagagtcatcaccaccagcaccagaacctgggccctgcccacttacaacaaccatctctacaagcaaatctccagccaatcaggagcttcaaacgacaaccactactttggctacagcaccccttgggggtattttgactttaacagattccactgccacttttcaccacgtgactggcaaagactcatcaacaacaactggggattccgacccaagagactcaacttcaagctcttcaacatccaagtcaaggaggtcacgacgaatgatggcgtcacgaccatcgctaataaccttaccagcacggttcaagtcttctcggactcggagtaccagttgccgtacgtcctcggctctgcgcaccagggctgcctccctccgttcccggcggacgtgttcatgattccgcagtacggctacctaacgctcaacaatggcagccaagccgtgggacgttcatccttttactgcctggaatatttcccttctcagatgctgagaacgggcaacaactttaccttcagctacacttttgaggacgttcctttccacagcagctacgctcacagccagagtctggaccgtctcatgaatcctctcatcgaccagtacctgtattacttgagcagaacaaacactccaagtggaaccaccacgcagtcaaggcttcagttttctcaggccggagcgagtgacattcgggaccagtctaggaactggcttcctggaccctgttaccgccagcagcgcgtttctaaaacaaaaacagacaacaacaacagcaattttacctggactggtgcttcaaaatataaccttaatgggcgtgaatctataatcaaccctggcactgctatggcctcacacaaagacgacgaagacaagttctttcccatgagcggtgtcatgatttttggaaaagagagcgccggagcttcaaacactgcattggacaatgtcatgattacagacgaagaggaaattaaagccactaaccctgtggccaccgaaagatttgggaccgtggcagtcaatttccagagcagcagcacagaccctgcgaccggagatgtgcatgctatgggagcattacctggcatggtgtggcaagatagagacgtgtacctgcagggtcccatttgggccaaaattcctcacacagatggacactttcacccgtctcctcttatgggcggctttggactcaagaacccgcctcctcagatcctcatcaaaaacacgcctgttcctgcgaatcctccggcggagttttcagctacaaagtttgcttcattcatcacccaatactccacaggacaagtgagtgtggaaattgaatgggagctgcagaaagaaaacagcaagcgctggaatcccgaagtgcagtacacatccaattatgcaaaatctgccaacgttgattttactgtggacaacaatggactttatactgagcctcgccccattggcacccgttaccttacccgtcccctgtaa

SEQ ID NO: 2729 - protein, 736 aa, Artificial Sequence
  Synthetic polypeptide
MAADGYLPDWLEDNLSEGIREWWDLKPGAPKPKANQQHQDNARGLVLPGYKYLGPGNGLDKGEPVNAADAAALEHDKAYDQQLKAGDNPYLKYNHADAEFQERLKEDTSFGGNLGRAVFQAKKRLLEPLGLVEEAAKTAPGKKRPVEPSPQRSPDSSTGIGKKGQQPAKKRLNFGQTGDSESVPDPQPLGEPPATPAAVGPTTMASGGGAPMADNNEGADGVGNSSGNWHCDSQWLGDRVITTSTRTWALPTYNNHLYKQISSQSGASNDNHYFGYSTPWGYFDFNRFHCHFSPRDWQRLINNNWGFRPKRLNFKLFNIQVKEVTTNDGVTTIANNLTSTVQVFSDSEYQLPYVLGSAHQGCLPPFPADVFMIPQYGYLTLNNGSQAVGRSSFYCLEYFPSQMLRTGNNFTFSYTFEDVPFHSSYAHSQSLDRLMNPLIDQYLYYLSRTNTPSGTTTQSRLQFSQAGASDIRDQSRNWLPGPCYRQQRVSKTKTDNNNSNFTWTGASKYNLNGRESIINPGTAMASHKDDEDKFFPMSGVMIFGKESAGASNTALDNVMITDEEEIKATNPVATERFGTVAVNFQSSSTDPATGDVHAMGALPGMVWQDRDVYLQGPIWAKIPHTDGHFHPSPLMGGFGLKNPPPQILIKNTPVPANPPAEFSATKFASFITQYSTGQVSVEIEWELQKENSKRWNPEVQYTSNYAKSANVDFTVDNNGLYTEPRPIGTRYLTRPL

SEQ ID NO: 2730 - DNA, 2211 bp, Artificial Sequence
  Synthetic polynucleotide
atggctgccgatggttatcttccagattggctcgaggacaaccttagtgaaggaattcgcgagtggtgggcgctgaaacctggagccccgaagcccaaagccaaccagcaaaagcaggacgacggccggggtctggtgcttccgggttacaaatacctcggacccggtaacggactcgacaaaggagagccggtcaacgaggcggacgcggcagccctcgagcacgacaaggcctacgaccagcagctcaaagcgggtgacaatccgtacctgcggtataaccacgccgacgccgagtttcaggagcgtctgcaagaagatacgtcttttgggggcaacctcgggcgagcagtcttccaggccaagaagcgggttctcgaacctctcggtctggttgaggaaggcgctaagacggctcccggaaagaaacgtccggtagagcagtcgccacaagagccagactcctctacgggcatcggcaagaaaggccaacagcccgccagaaaaagactcaatttcggtcagactggcgactcagagtcagttccagaccctcaacctctcggagaacctccagcagcgccctctggtgtgggacctactacaatggcttcaggcggtggcgcaccaatggcagacaataacgaaggcgccgacggagtgggtaatgcctcaggaaattggcattgcgattccacatggctgggcgacagagtcatcaccaccagcacccgaacatgggccttgcccacctataacaaccacctctacaagcaaatctccagtgcttcaacgggggccagcaacgacaacacctacttcggctacagcaccccctgggggtattttgatttcaacagattccactgccatttctcaccacgtgactggcagcgactcatcaacaacaattggggattccggcccaagagactcaacttcaaactcttcaacatccaagtcaaggaggtcacgacgaatgatggcgtcacgaccatcgctaataaccttaccagcacggttcaagtcttctcggactcggagtaccagttgccgtacgtcctcggctctgcgcaccagggctgcctccctccgttcccggcggacgtgttcatgattccgcagtacggctacctaacgctcaacaatggcagccaggcagtgggacggtcatccttttactgcctggaatatttcccatcgcagatgctgagaacgggcaataactttaccttcagctacaccttcgaggacgtgcctttccacagcagctacgcgcacagccagagcctggaccggctgatgaatcctctcatcgaccagtacctgtattacctgaacagaactcagaatcagtccggaagtgcccaaaacaaggacttgctgtttagccgggggtctccagctggcatgtctgttcagcccaaaaactggctacctggaccctgttatcggcagcagcgcgtttctaaaacaaaaacagacaacaacaacagcaattttacctggactggtgcttcaaaatataacctcaatgggcgtgaatccatcatcaaccctggcactgctatggcctcacacaaagacgacgaagacaagttctttcccatgagcggtgtcatgatttttggaaaagagagcgccggagcttcaaacactgcattggacaatgtcatgattacagacgaagaggaaattaaagccactaaccctgtggccaccgaaagatttgggaccgtggcagtcaatttccagagcagcagcacagaccctgcgaccggagatgtgcatgttatgggagccttacctggaatggtgtggcaagacagagacgtatacctgcagggtcctatttgggccaaaattcctcacacagatggacactttcacccgtctcctcttatgggcggctttggactcaagaacccgcctcctcagatcctcatcaaaaacacgcctgttcctgcgaatcctccggcagagttttcggctacaaagtttgcttcattcatcacccagtattccacaggacaagtgagcgtggagattgaatgggagctgcagaaagaaaacagcaaacgctggaatcccgaagtgcagtatacatctaactatgcaaaatctgccaacgttgatttcactgtggacaacaatggactttatactgagcctcgccccattggcacccgttacctcacccgtcccctgtaa

SEQ ID NO: 2731 - protein, 736 aa, Artificial Sequence
  Synthetic polypeptide
MAADGYLPDWLEDNLSEGIREWWALKPGAPKPKANQQKQDDGRGLVLPGYKYLGPGNGLDKGEPVNEADAAALEHDKAYDQQLKAGDNPYLRYNHADAEFQERLQEDTSFGGNLGRAVFQAKKRVLEPLGLVEEGAKTAPGKKRPVEQSPQEPDSSTGIGKKGQQPARKRLNFGQTGDSESVPDPQPLGEPPAAPSGVGPTTMASGGGAPMADNNEGADGVGNASGNWHCDSTWLGDRVITTSTRTWALPTYNNHLYKQISSASTGASNDNTYFGYSTPWGYFDFNRFHCHFSPRDWQRLINNNWGFRPKRLNFKLFNIQVKEVTTNDGVTTIANNLTSTVQVFSDSEYQLPYVLGSAHQGCLPPFPADVFMIPQYGYLTLNNGSQAVGRSSFYCLEYFPSQMLRTGNNFTFSYTFEDVPFHSSYAHSQSLDRLMNPLIDQYLYYLNRTQNQSGSAQNKDLLFSRGSPAGMSVQPKNWLPGPCYRQQRVSKTKTDNNNSNFTWTGASKYNLNGRESIINPGTAMASHKDDEDKFFPMSGVMIFGKESAGASNTALDNVMITDEEEIKATNPVATERFGTVAVNFQSSSTDPATGDVHVMGALPGMVWQDRDVYLQGPIWAKIPHTDGHFHPSPLMGGFGLKNPPPQILIKNTPVPANPPAEFSATKFASFITQYSTGQVSVEIEWELQKENSKRWNPEVQYTSNYAKSANVDFTVDNNGLYTEPRPIGTRYLTRPL

SEQ ID NO: 2732 - DNA, 2205 bp, Artificial Sequence
  Synthetic polynucleotide
atggctgctgacggttatcttccagattggctcgaggacaacctttctgaaggcattcgtgagtggtgggctctgaaacctggagtccctcaacccaaagcgaaccaacaacaccaggacaaccgtcggggtcttgtgcttccgggttacaaatacctcggacccggtaacggactcgacaaaggagagccggtcaacgaggcggacgcggcagccctcgaacacgacaaggcctacgaccagcagctcaaggccggagacaacccgtacctcaagtacaaccacgccgacgccgagttccaggagcggctcaaagaagatacgtcttttgggggcaacctcgggcgagcagtcttccaggccaaaaagaggcttcttgaacctcttggtctggttgaggaagcggctaagacggctcctggaaagaagaggcctgtagagcagtctcctcaggaaccggactcctccgcgggtattggcaaatcgggtgcacagcccgctaaaaagagactcaatttcggtcagactggcgacacagagtcagtcccagaccctcaaccaatcggagaacctcccgcagccccctcaggtgtgggatctcttacaatggcttcaggtggtggcgcaccagtggcagacaataacgaaggtgccgatggagtgggtagttcctcgggaaattggcattgcgattcccaatggctgggggacagagtcatcaccaccagcacccgaacctgggccctgcccacctacaacaaccacctctacaaacaaatttccagccaatcaggagcctcgaacgacaatcactactttggctacagcaccccttgggggtattttgacttcaacagattccactgccacttttcaccacgtgactggcagcgactcatcaacaacaactggggattccggcccaagagactcagcttcaagctcttcaacatccaggtcaaagaggttacggacaacaatggagtcaagaccatcgccaataaccttaccagcacggtccaggtcttcacggactcagactatcagctcccgtacgtgctcgggtcggctcacgagggctgcctcccgccgttcccagcggacgttttcatgattcctcagtacgggtatctgacgcttaatgatggaagccaggccgtgggtcgttcgtccttttactgcctggaatatttcccgtcgcaaatgctaagaacgggtaacaacttccagttcagctacgagtttgagaacgtacctttccatagcagctacgctcacagccaaagcctggaccgactaatgaatccactcatcgaccaatacttgtactatctctcaaagactattaacggttctggacagaatcaacaaacgctaaaattcagtgtggccggacccagcaacatggctgtccagggaagaaactacatacctggacccagctaccgacaacaacgtgtctcaaccactgtgactcaaaacaacaacagcgaatttgcttggcctggagcttcttcttgggctctcaatggacgtaatagcttgatgaatcctggacctgctatggccagccacaaagaaggagaggaccgtttctttcctttgtctggatctttaatttttggcaaacaaggaactggaagagacaacgtggatgcggacaaagtcatgataaccaacgaagaagaaattaaaactactaacccggtagcaacggagtcctatggacaagtggccacaaaccaccagagtgcccaagcacaggcgcagaccggctgggttcaaaaccaaggaatacttccgggtatggtttggcaggacagagatgtgtacctgcaaggacccatctgggccaagattcctcacacggacggcaacttccacccgtctccgctgatgggcggctttggcctgaaacatcctccgcctcagatcctgatcaagaacacgcctgtacctgcggatcctccgaccaccttcaaccagtcaaagctgaactctttcatcacgcaatacagcaccggacaggtcagcgtggaaattgaatgggagctgcagaaggaaaacagcaagcgctggaatcccgaagtgcagtatacatctaactatgcaaaatctgccaacgttgatttcactgtggacaacaatggactttatactgagcctcgccccattggcacccgttacctcacccgtcccctgtaa

SEQ ID NO: 2733 - protein, 734 aa, Artificial Sequence
  Synthetic polypeptide
MAADGYLPDWLEDNLSEGIREWWALKPGVPQPKANQQHQDNRRGLVLPGYKYLGPGNGLDKGEPVNEADAAALEHDKAYDQQLKAGDNPYLKYNHADAEFQERLKEDTSFGGNLGRAVFQAKKRLLEPLGLVEEAAKTAPGKKRPVEQSPQEPDSSAGIGKSGAQPAKKRLNFGQTGDTESVPDPQPIGEPPAAPSGVGSLTMASGGGAPVADNNEGADGVGSSSGNWHCDSQWLGDRVITTSTRTWALPTYNNHLYKQISSQSGASNDNHYFGYSTPWGYFDFNRFHCHFSPRDWQRLINNNWGFRPKRLSFKLFNIQVKEVTDNNGVKTIANNLTSTVQVFTDSDYQLPYVLGSAHEGCLPPFPADVFMIPQYGYLTLNDGSQAVGRSSFYCLEYFPSQMLRTGNNFQFSYEFENVPFHSSYAHSQSLDRLMNPLIDQYLYYLSKTINGSGQNQQTLKFSVAGPSNMAVQGRNYIPGPSYRQQRVSTTVTQNNNSEFAWPGASSWALNGRNSLMNPGPAMASHKEGEDRFFPLSGSLIFGKQGTGRDNVDADKVMITNEEEIKTTNPVATESYGQVATNHQSAQAQAQTGWVQNQGILPGMVWQDRDVYLQGPIWAKIPHTDGNFHPSPLMGGFGLKHPPPQILIKNTPVPADPPTTFNQSKLNSFITQYSTGQVSVEIEWELQKENSKRWNPEVQYTSNYAKSANVDFTVDNNGLYTEPRPIGTRYLTRPL

SEQ ID NO: 2734 - DNA, 2211 bp, Artificial Sequence
  Synthetic polynucleotide
atggctgccgatggttatcttccagattggctcgaggacaacctctctgagggcattcgcgagtggtgggcgctgaaacctggagccccgaagcccaaagccaaccagcaaaagcaggacgacggccggggtctggtgcttcctggctacaagtacctcggacccttcaacggactcgacaagggggagcccgtcaacgcggcggacgcagcggccctcgagcacgacaaggcctacgaccagcagctgcaggcgggtgacaatccgtacctgcggtataaccacgccgacgccgagtttcaggagcgtctgcaagaagatacgtcttttgggggcaacctcgggcgagcagtcttccaggccaagaagtgggttctcgaacctctcggtctggttgaggaaggcgctaagacggctcctggaaagaaacgtccggtagagcagtcgccacaagagccagactcctcctcgggcatcggcaagacaggccagcagcccgctaaaaagagactcaattttggtcagactggcgactcagagtcagtccccgacccacaacctctcggagaacctccagcaacccccgctgctgtgggacctactacaatggcttcaggcggtggcgcaccaatggcagacaataacgaaggcgccgacggagtgggtaatgcctcaggaaattggcattgcgattccacatggctgggcgacagagtcatcaccaccagcacccgcacctgggccttgcccacctacaataaccacctctacaagcaaatctccagtgcttcaacgggggccagcaacgacaaccactacttcggctacagcaccccctgggggtattttgatttcaacagattccactgccatttctcaccacgtgactggcagcgactcatcaacaacaattggggattccggcccaagagactcaacttcaagctcttcaacatccaagtcaaggaggtcacgacgaatgatggcgtcacaaccatcgctaataaccttaccagcacggttcaagtcttctcggactcggagtaccagcttccgtacgtcctcggctctgcgcaccagggctgcctccctccgttcccggcggacgtgttcatgattccgcaatacggctacctgacgctcaacaatggcagccaagccgtgggacgttcatccttttactgcctggaatatttcccttctcagatgctgagaacgggcaacaactttaccttcagctacacctttgaggaagtgcctttccacagcagctacgcgcacagccagagcctggaccggctgatgaatcctctcatcgaccaatacctgtattacctgaacagaactcaaaatcagtccggaagtgcccaaaacaaggacttgctgtttagccgtgggtctccagctggcatgtctgttcagcccaaaaactggctacctggaccctgttatcggcagcagcgcgtttctaaaacaaaaacagacaacaacaacagcaattttacctggactggtgcttcaaaatataacctcaatgggcgtgaatccatcatcaaccctggcactgctatggcctcacacaaagacgacgaagacaagttctttcccatgagcggtgtcatgatttttggaaaggagagcgccggagcttcaaacactgcattggacaatgtcatgatcaccgacgaagaggaaatcaaagccactaaccccgtggccaccgaaagatttgggactgtggcagtcaatctccagagcagcagcacagaccctgcgaccggagatgtgcatgttatgggagccttacctggcatggtgtggcaagatagagacgtgtacctgcagggtcccatttgggccaaaattcctcacacagatggacactttcacccgtctcctcttatgggcggctttggactcaagaacccgcctcctcagatcctcatcaaaaacacgcctgttcctgcgaatcctccggcggagttttcagctacaaagtttgcttcattcatcacccaatactccacaggacaagtgagtgtggaaattgaatgggagctgcagaaagaaaacagcaagcgctggaatcccgaagtgcagtacacatccaattatgcaaaatctgccaacgttgattttactgtggacaacaatggactttatactgagcctcgccccattggcacccgttacctcacccgtcccctgtaa

SEQ ID NO: 2735 - protein, 736 aa, Artificial Sequence
  Synthetic polypeptide
MAADGYLPDWLEDNLSEGIREWWALKPGAPKPKANQQKQDDGRGLVLPGYKYLGPFNGLDKGEPVNAADAAALEHDKAYDQQLQAGDNPYLRYNHADAEFQERLQEDTSFGGNLGRAVFQAKKWVLEPLGLVEEGAKTAPGKKRPVEQSPQEPDSSSGIGKTGQQPAKKRLNFGQTGDSESVPDPQPLGEPPATPAAVGPTTMASGGGAPMADNNEGADGVGNASGNWHCDSTWLGDRVITTSTRTWALPTYNNHLYKQISSASTGASNDNHYFGYSTPWGYFDFNRFHCHFSPRDWQRLINNNWGFRPKRLNFKLFNIQVKEVTTNDGVTTIANNLTSTVQVFSDSEYQLPYVLGSAHQGCLPPFPADVFMIPQYGYLTLNNGSQAVGRSSFYCLEYFPSQMLRTGNNFTFSYTFEEVPFHSSYAHSQSLDRLMNPLIDQYLYYLNRTQNQSGSAQNKDLLFSRGSPAGMSVQPKNWLPGPCYRQQRVSKTKTDNNNSNFTWTGASKYNLNGRESIINPGTAMASHKDDEDKFFPMSGVMIFGKESAGASNTALDNVMITDEEEIKATNPVATERFGTVAVNLQSSSTDPATGDVHVMGALPGMVWQDRDVYLQGPIWAKIPHTDGHFHPSPLMGGFGLKNPPPQILIKNTPVPANPPAEFSATKFASFITQYSTGQVSVEIEWELQKENSKRWNPEVQYTSNYAKSANVDFTVDNNGLYTEPRPIGTRYLTRPL

SEQ ID NO: 2736 - DNA, 2214 bp, Artificial Sequence
  Synthetic polynucleotide
atggctgccgatggttatcttccagattggctcgaggacaaccttagtgaaggaattcgcgagtggtgggctttgaaacctggagcccctcaacccaaggcaaatcaacaacatcaagacaacgctcgaggtcttgtgcttccgggttacaaataccttggacccggcaacggactcgacaagggggagccggtcaacgcagcagacgcggcggccctcgagcacgacaaggcctacgaccagcagctgcaggcgggtgacaatccgtacctgcggtataaccacgccgacgccgagtttcaggagcgtctgcaagaagatacgtcttttgggggcaaccttggcagagcagtcttccaggccaaaaagaggatccttgagcctcttggtctggttgaggaagcagctaaaacggctcctggaaagaagaggcctgtagatcagtctcctcaggaaccggactcatcatctggtgttggcaaatcgggcaaacagcctgccagaaaaagactaaatttcggtcagactggcgactcagagtcagtcccagaccctcaacctctcggagaaccaccagcagcccccacaagtttgggatctaatacaatggcttcaggcggtggcgcaccaatggcagacaataacgagggtgccgatggggtgggtagttcctcgggaaattggcattgcgattcccaatggctgggggacagagtcatcaccaccagcacccgaacctgggccctgcccacctacaacaatcacctctacaagcaaatctccaacgggacatcgggaggagccaccaacgacaacacctacttcggctacagcaccccctgggggtattttgactttaacagattccactgccacttttcaccacgtgactggcagcgactcatcaacaacaactggggattccggcccaagagactcagcttcaagctcttcaacatccaggtcaaggaggtcacgcagaatgaaggcaccaagaccatcgccaataacctcaccagcaccatccaggtgtttacggactcggagtaccagctgccgtacgttctcggctcggcgcaccagggctgcctccctccgttcccggcggacgtcttcatggtgccacagtatggatacctgacgctcaacaatggcagccaagccgtgggacgttcatccttttactgcctggaatatttcccttctcagatgctgagaacgggcaacaactttaccttcagctacacctttgaggaagtgcctttccacagcagctacgcgcacagccagagcttggaccggctgatgaatcctctgattgaccagtacctgtactacttgtctcggactcaaacaacaggaggcacggcaaatacgcagactctgggcttcagccaaggtgggcctaatacaatggccaatcaggcaaagaactggctgccaggaccctgttaccgccaacaacgcgtctcaacgacaaccgggcaaaacaacaatagcaactttgcctggactgctgggaccaaataccatctgaatggaagaaattcattggctaatcctggcatcgctatggcaacacacaaagacgacgaggagcgtttttttcccagtaacgggatcctgatttttggcaaacaaaatgctgccagagacaatgcggattacagcgatgtcatgctcaccagcgaggaagaaatcaaaaccactaaccctgtggctacagaggaatacggtatcgtggcagataacttgcagcagcaaaacacggctcctcaaattggaactgtcaacagccagggggacttacccggtatggtctggcagaaccgggacgtgtacctgcagggtcccatctgggccaagattcctcacacggacggcaacttccacccgtctccgctgatgggcggctttggcctgaaacatcctccgcctcagatcctgatcaagaacacgcctgtacctgcggatcctccgaccaccttcaaccagtcaaagctgaactctttcatcacgcaatacagcaccggacaggtcagcgtggagatcgagtgggagctgcagaaggaaaacagcaagcgctggaacccggagatccagtacacttccaactattacaagtctaataatgttgaatttgctgttaatactgaaggtgtatatagtgaaccccgccccattggcaccagatacctgactcgtaatctgtaa

SEQ ID NO: 2737 - protein, 737 aa, Artificial Sequence
  Synthetic polypeptide
MAADGYLPDWLEDNLSEGIREWWALKPGAPQPKANQQHQDNARGLVLPGYKYLGPGNGLDKGEPVNAADAAALEHDKAYDQQLQAGDNPYLRYNHADAEFQERLQEDTSFGGNLGRAVFQAKKRILEPLGLVEEAAKTAPGKKRPVDQSPQEPDSSSGVGKSGKQPARKRLNFGQTGDSESVPDPQPLGEPPAAPTSLGSNTMASGGGAPMADNNEGADGVGSSSGNWHCDSQWLGDRVITTSTRTWALPTYNNHLYKQISNGTSGGATNDNTYFGYSTPWGYFDFNRFHCHFSPRDWQRLINNNWGFRPKRLSFKLFNIQVKEVTQNEGTKTIANNLTSTIQVFTDSEYQLPYVLGSAHQGCLPPFPADVFMVPQYGYLTLNNGSQAVGRSSFYCLEYFPSQMLRTGNNFTFSYTFEEVPFHSSYAHSQSLDRLMNPLIDQYLYYLSRTQTTGGTANTQTLGFSQGGPNTMANQAKNWLPGPCYRQQRVSTTTGQNNNSNFAWTAGTKYHLNGRNSLANPGIAMATHKDDEERFFPSNGILIFGKQNAARDNADYSDVMLTSEEEIKTTNPVATEEYGIVADNLQQQNTAPQIGTVNSQGDLPGMVWQNRDVYLQGPIWAKIPHTDGNFHPSPLMGGFGLKHPPPQILIKNTPVPADPPTTFNQSKLNSFITQYSTGQVSVEIEWELQKENSKRWNPEIQYTSNYYKSNNVEFAVNTEGVYSEPRPIGTRYLTRNL

SEQ ID NO: 2738 - DNA, 2205 bp, Artificial Sequence
  Synthetic polynucleotide
atggctgctgacggttatcttccagattggctcgaggacaacctttctgaaggcattcgtgagtggtgggctctgaaacctggagtccctcaacccaaagcgaaccaacaacaccaggacaactgtcggggtcttgtgcttccgggttacaaatacctcggacccggtaacggactcgacaaaggagagccggtcaacgaggcggacgcggcagccctcgaacacgacaaggcctacgaccagcagctcaaggccggagacaacccgtacctcaagtacaaccacgccgacgccgagttccaggagcggctcaaagaagatacgtcttttgggggcaacctcgggcgagcagtcttccagaccaaaaagaggcttcttgaacctcttggtctggttgaggaagcggctaagacggctcctggaaagaagaggcctgtagagcagtctcctcaggaaccggactcctccgcgggtattggcaaatcgggtgcacagcccgctaaaaagagactcaatttcggtcagactggcgacacagagtcagtcccagaccctcaaccaatcggagaacctcccgcagccccctcaggtgtgggatctcttacaatggcttcaggtggtggcgcaccagtggcagacaataacgaaggtgccgatggagtgggtagttcctcgggaaattggcattgcgattcccaatggctgggggacagagtcatcaccaccagcacccgaacctgggccctgcccacctacaacaaccacctctacaaacaaatttccagccaatcaggagcctcgaacgacaatcactactttggctacagcaccccttgggggtattttgacttcaacagattccactgccacttttcaccacgtgactggcagcgactcatcaacaacaactggggattccggcccaagagactcagcttcaagctcttcaacatccaggtcaaagaggttacggacaacaatggagtcaagaccatcgccaataaccttaccagcacggtccaggtcttcacggactcagactatcagctcccgtacgtgctcgggtcggctcacgagggctgcctcccgccgttcccagcggacgttttcatgattcctcagtacgggtatctgacgcttaatgatggaagccaggccgtgggtcgttcgtccttttactgcctggaatatttcccgtcgcaaatgctaagaacgggtaacaacttccagttcagctacgagtttgagaacgtacctttccatagcagctacgctcacagccaaagcctggaccgactaatgaatccactcatcgaccaatacttgtactatctctcaaagactattaacggttctggacagaatcaacaaacgctaaaattcagtgtggccggacccagcaacatggctgtccagggaagaaactacatacctggacccagctaccgacaacaacgtgtctcaaccactgtgactcaaaacaacaacagcgaatttgcttggcctggagcttcttcttgggctctcaatggacgtaatagcttgatgaatcctggacctgctatggccagccacaaagaaggagaggaccgtttctttcctttgtctggatctttaatttttggcaaacaaggaactggaagagacaacgtggatgcggacaaagtcatgataaccaacgaagaagaaattaaaactactaacccggtagcaacggagtcctatggacaagtggccacaaaccaccagagtgcccaagcacaggcgcagaccggctgggttcaaaaccaaggaatacttccgggtatggtttggcaggacagagatgtgtacctgcaaggacccatctgggccaagattcctcacacggacggcaacttccacccgtctccgctgatgggcggctttggcctgaaacatcctccgcctcagatcctgatcaagaacacgcctgttcctgcgaatcctccggcggagttttcagctacaaagtttgcttcattcatcacccagtactccacaggacaagtgagtgtggaaattgaatgggagctgcagaaagaaaacagcaagcgctggaatcccgaagtgcagtacacatccaattatgcaaaatctgccaacgttgattttactgtggacaacaatggactttatactgagcctcgccccattggcacccgttaccttaccaaacctctgtaa

SEQ ID NO: 2739 - protein, 734 aa, Artificial Sequence
  Synthetic polypeptide
MAADGYLPDWLEDNLSEGIREWWALKPGVPQPKANQQHQDNCRGLVLPGYKYLGPGNGLDKGEPVNEADAAALEHDKAYDQQLKAGDNPYLKYNHADAEFQERLKEDTSFGGNLGRAVFQTKKRLLEPLGLVEEAAKTAPGKKRPVEQSPQEPDSSAGIGKSGAQPAKKRLNFGQTGDTESVPDPQPIGEPPAAPSGVGSLTMASGGGAPVADNNEGADGVGSSSGNWHCDSQWLGDRVITTSTRTWALPTYNNHLYKQISSQSGASNDNHYFGYSTPWGYFDFNRFHCHFSPRDWQRLINNNWGFRPKRLSFKLFNIQVKEVTDNNGVKTIANNLTSTVQVFTDSDYQLPYVLGSAHEGCLPPFPADVFMIPQYGYLTLNDGSQAVGRSSFYCLEYFPSQMLRTGNNFQFSYEFENVPFHSSYAHSQSLDRLMNPLIDQYLYYLSKTINGSGQNQQTLKFSVAGPSNMAVQGRNYIPGPSYRQQRVSTTVTQNNNSEFAWPGASSWALNGRNSLMNPGPAMASHKEGEDRFFPLSGSLIFGKQGTGRDNVDADKVMITNEEEIKTTNPVATESYGQVATNHQSAQAQAQTGWVQNQGILPGMVWQDRDVYLQGPIWAKIPHTDGNFHPSPLMGGFGLKHPPPQILIKNTPVPANPPAEFSATKFASFITQYSTGQVSVEIEWELQKENSKRWNPEVQYTSNYAKSANVDFTVDNNGLYTEPRPIGTRYLTKPL

SEQ ID NO: 2740 - DNA, 2211 bp, Artificial Sequence
  Synthetic polynucleotide
atggctgccgatggttatcttccagattggctcgaggacaacctctctgagggcattcgcgagtggtgggacttgaaacctggagcccctaaacccaaggcaaatcaacaacatcaggacaacgctcgaggtcttgtgcttccgggttacaaataccttggacccggcaacggactcgacaagggggagccggtcaacgcagcagacgcggcggccctcgagcacgacaaggcctacgaccagcagctcaaggccggagacaacccgtacctcaagtacaaccacgccgacgccgagttccaggagcggctcaaagaagatacgtcttttgggggcaacctcgggcgagcagtcttccaggccaaaaagaggcttcttgaacctcttggtctggttgaggaagcggctaagacggctcctggaaagaagagaccggtagagccatcaccccagcgttctccagactcctctacgggcatcggcaagaaaggccaacagcccgctaaaaagagactcaattttggtcagactggcgactcagagtcagtccccgacccacaacctctcggagaacctccagcaacccccgctgctgtgggacctactacaatggcttcaggcggtggcgcaccaatggcagacaataacgagggtgccgatggagtgggtaattcctcaggaaattggcattgcgattcccaatggctgggcgacagagtcatcaccaccagcaccagaacctgggccctgcccacttacaacaaccatctctacaagcaaatctccagccaatcaggagcttcaaacgacaaccactactttggctacagcaccccttgggggtattttgactttaacagattccactgccacttttcaccacgtgactggcaaagactcatcaacaacaactggggattccgacccaagagactcaacttcaagctcttcaacatccaagtcaaggaggtcacgacgaatgatggcgtcacgaccatcgctaataaccttaccagcacggttcaagtcttctcggactcggagtaccagttgccgtacgtcctcggctctgcgcaccagggctgcctccctccgttcccggcggacgtgttcatgattccgcagtacggctacctaacgctcaacaatggcagccaagccgtgggacgttcatccttttactgcctggaatatttcccttctcagatgctgagaacgggcaacaactttaccttcagctacacttttgaggacgttcctttccacagcagctacgctcacagccagagtctggaccgtctcatgaatcctctcatcgaccagtacctgtattacttgagcagaacaaacactccaagtggaaccaccacgcagtcaaggcttcagttttctcaggccggagcgagtgacattcgggaccagtctaggaactggcttcctggaccctgttaccgccagcagcgcgtttctaaaacaaaaacagacaacaacaacagcaattttacctggactggtgcttcaaaatataaccttaatgggcgtgaatctataatcaaccctggcactgctatggcctcacacaaagacgacgaagacaagttctttcccatgagcggtgtcatgatttttggaaaagagagcgccggagcttcaaacactgcattggacaatgtcatgatcacagacgaagaggaaatcaaagccactaaccccgtggccaccgaaagatttgggactgtggcagtcaatctccagagcagcagcacagaccctgcgaccggagatgtgcatgttatgggagcattacctggcatggtgtggcaagatagagacgtgtacctgcagggtcccatttgggccaaaattcctcacacagatggacactttcacccgtctcctcttatgggcggctttggactcaagaacccgcctcctcagatcctcatcaaaaacacgcctgttcctgcgaatcctccggcggagttttcagctacaaagtttgcttcattcatcacccaatactccacaggacaagtgagtgtggaaattgaatgggagctgcagaaagaaaacagcaagcgctggaatcccgaagtgcagtacacatccaattatgcaaaatctgccaacgttgattttactgtggacaacaatggactttatactgagcctcgccccattggcacccgttaccttacccgtcccctgtaa

SEQ ID NO: 2741 - protein, 736 aa, Artificial Sequence
  Synthetic polypeptide
MAADGYLPDWLEDNLSEGIREWWDLKPGAPKPKANQQHQDNARGLVLPGYKYLGPGNGLDKGEPVNAADAAALEHDKAYDQQLKAGDNPYLKYNHADAEFQERLKEDTSFGGNLGRAVFQAKKRLLEPLGLVEEAAKTAPGKKRPVEPSPQRSPDSSTGIGKKGQQPAKKRLNFGQTGDSESVPDPQPLGEPPATPAAVGPTTMASGGGAPMADNNEGADGVGNSSGNWHCDSQWLGDRVITTSTRTWALPTYNNHLYKQISSQSGASNDNHYFGYSTPWGYFDFNRFHCHFSPRDWQRLINNNWGFRPKRLNFKLFNIQVKEVTTNDGVTTIANNLTSTVQVFSDSEYQLPYVLGSAHQGCLPPFPADVFMIPQYGYLTLNNGSQAVGRSSFYCLEYFPSQMLRTGNNFTFSYTFEDVPFHSSYAHSQSLDRLMNPLIDQYLYYLSRTNTPSGTTTQSRLQFSQAGASDIRDQSRNWLPGPCYRQQRVSKTKTDNNNSNFTWTGASKYNLNGRESIINPGTAMASHKDDEDKFFPMSGVMIFGKESAGASNTALDNVMITDEEEIKATNPVATERFGTVAVNLQSSSTDPATGDVHVMGALPGMVWQDRDVYLQGPIWAKIPHTDGHFHPSPLMGGFGLKNPPPQILIKNTPVPANPPAEFSATKFASFITQYSTGQVSVEIEWELQKENSKRWNPEVQYTSNYAKSANVDFTVDNNGLYTEPRPIGTRYLTRPL

SEQ ID NO: 2742 - DNA, 2214 bp, Artificial Sequence; identical to SEQ ID NO: 2714
  Synthetic polynucleotide

SEQ ID NO: 2743 - protein, 737 aa, Artificial Sequence; identical to SEQ ID NO: 2715
  Synthetic polypeptide

SEQ ID NO: 2744 - DNA, 2205 bp, Artificial Sequence
  Synthetic polynucleotide
atggctgctgacggttatcttccagattggctcgaggacaacctttctgaaggcattcgtgagtggtgggctctgaaacctggagtccctcaacccaaagcgaaccaacaacaccaggacaaccgtcggggtcttgtgcttccgggttacaaatacctcggacccggtaacggactcgacaaaggagagccggtcaacgaggcggacgcggcagccctcgaacacgacaaggcctacgaccagcagctcaaggccggagacaacccgtacctcaagtacaaccacgccgacgccgagttccaggagcggctcaaagaagatacgtcttttgggggcaacctcgggcgagcagtcttccaggccaaaaagaggcttcttgaacctcttggtctggttgaggaagcggctaagacggctcctggaaagaagaggcctgtagagcagtctcctcaggaaccggactcctccgcgggtattggcaaatcgggtgcacagcccgctaaaaagagactcaatttcggtcagactggcgacacagagtcagtcccagaccctcaaccaatcggagaacctcccgcagccccctcaggtgtgggatctcttacaatggcttcaggtggtggcgcaccagtggcagacaataacgaaggtgccgatggagtgggtagttcctcgggaaattggcattgcgattcccaatggctgggggacagagtcatcaccaccagcacccgaacctgggccctgcccacctacaacaaccacctctacaaacaaatttccagccaatcaggagcctcgaacgacaatcactactttggctacagcaccccttgggggtattttgacttcaacagattccactgccacttttcaccacgtgactggcagcgactcatcaacaacaactggggattccggcccaagagactcagcttcaagctcttcaacatccaggtcaaagaggttacggacaacaatggagtcaagaccatcgccaataaccttaccagcacggtccaggtcttcacggactcagactatcagctcccgtacgtgctcgggtcggctcacgagggctgcctcccgccgttcccagcggacgttttcatgattcctcagtacgggtatctgacgcttaatgatggaagccaggccgtgggtcgttcgtccttttactgcctggaatatttcccgtcgcaaatgctaagaacgggtaacaacttccagttcagctacgagtttgagaacgtacctttccatagcagctacgctcacagccaaagcctggaccgactaatgaatccactcatcgaccaatacttgtactatctctcaaagactattaacggttctggacagaatcaacaaacgctaaaattcagtgtggccggacccagcaacatggctgtccagggaagaaactacatacctggacccagctaccgacaacaacgtgtctcaaccactgtgactcaaaacaacaacagcgaatttgcttggcctggagcttcttcttgggctctcaatggacgtaatagcttgatgaatcctggacctgctatggccagccacaaagaaggagaggaccgtttctttcctttgtctggatctttaatttttggcaaacaaggaactggaagagacaacgtggatgcggacaaagtcatgataaccaacgaagaagaaattaaaactactaacccggtagcaacggagtcctatggacaagtggccacaaaccaccagagtgcccaagcacaggcgcagaccggctgggttcaaaaccaaggaatacttccgggtatggtttggcaggacagagatgtgtacctgcaaggacccatttgggccaaaattcctcacacggacggcaactttcacccttctccgctgatgggagggtttggaatgaaacacccgcctcctcagatcctcatcaaaaacacacctgtacctgcggatcctccaacggccttcaacaaggacaagctgaactctttcatcacccagtattctactggccaagtcagcgtggagatcgagtgggagctgcagaaggaaaacagcaagcgctggaaccccgagatccagtacacctccaactactacaaatctacaagtgtggactttgctgttaatacagaaggcgtgtactctgaaccccgccccattggcacccgttacctcacccgtaatctgtaa

SEQ ID NO: 2745 - protein, 734 aa, Artificial Sequence
  Synthetic polypeptide
MAADGYLPDWLEDNLSEGIREWWALKPGVPQPKANQQHQDNRRGLVLPGYKYLGPGNGLDKGEPVNEADAAALEHDKAYDQQLKAGDNPYLKYNHADAEFQERLKEDTSFGGNLGRAVFQAKKRLLEPLGLVEEAAKTAPGKKRPVEQSPQEPDSSAGIGKSGAQPAKKRLNFGQTGDTESVPDPQPIGEPPAAPSGVGSLTMASGGGAPVADNNEGADGVGSSSGNWHCDSQWLGDRVITTSTRTWALPTYNNHLYKQISSQSGASNDNHYFGYSTPWGYFDFNRFHCHFSPRDWQRLINNNWGFRPKRLSFKLFNIQVKEVTDNNGVKTIANNLTSTVQVFTDSDYQLPYVLGSAHEGCLPPFPADVFMIPQYGYLTLNDGSQAVGRSSFYCLEYFPSQMLRTGNNFQFSYEFENVPFHSSYAHSQSLDRLMNPLIDQYLYYLSKTINGSGQNQQTLKFSVAGPSNMAVQGRNYIPGPSYRQQRVSTTVTQNNNSEFAWPGASSWALNGRNSLMNPGPAMASHKEGEDRFFPLSGSLIFGKQGTGRDNVDADKVMITNEEEIKTTNPVATESYGQVATNHQSAQAQAQTGWVQNQGILPGMVWQDRDVYLQGPIWAKIPHTDGNFHPSPLMGGFGMKHPPPQILIKNTPVPADPPTAFNKDKLNSFITQYSTGQVSVEIEWELQKENSKRWNPEIQYTSNYYKSTSVDFAVNTEGVYSEPRPIGTRYLTRNL

SEQ ID NO: 2746 - DNA, 2217 bp, Artificial Sequence
  Synthetic polynucleotide
atggctgccgatggttatcttccagattggctcgaggacaacctctctgagggcattcgcgagtggtgggcgctgaaacctggagccccgaagcccaaagccaaccagcaaaagcaggacgacggccggggtctggtgcttcctggctacaagtacctcggacccttcaacggactcgacaagggggagcccgtcaacgcggcggacgcagcggccctcgagcacgacaaggcctacgaccagcagctgcaggcgggtgacaatccgtacctgcggtataaccacgccgacgccgagtttcaggagcgtctgcaagaagatacgtcttttgggggcaacctcgggcgagcagtcttccaggccaagaagcgggttctcgaacctctcggtctggttgaggaaggcgctaagacggctcctggaaagaagagaccggtagagccatcaccccagcgttctccagactcctctacgggcatcggcaagaaaggccaacagcccgccagaaaaagactcaattttggtcagactggcgactcagagtcagttccagaccctcaacctctcggagaacctccagcagcgccctctggtgtgggacctaatacaatggctgcaggcggtggcgcaccaatggcagacaataacgaaggcgccgacggagtgggtagttcctcgggaaattggcattgcgattccacatggctgggcgacagagtcatcaccaccagcacccgaacctgggccctgcccacctacaacaaccacctctacaagcaaatctccaacgggacatcgggaggagccaccaacgacaacacctacttcggctacagcaccccctgggggtattttgactttaacagattccactgccacttttcaccacgtgactggcagcgactcatcaacaacaactggggattccggcccaagagactcagcttcaagctcttcaacatccaggtcaaggaggtcacgcagaatgaaggcaccaagaccatcgccaataacctcaccagcaccatccaggtgtttacggactcggagtaccagctgccgtacgttctcggctctgcccaccagggctgcctgcctccgttcccggcggacgtgttcatgattccccagtacggctacctaacactcaacaacggtagtcaggccgtgggacgctcctccttctactgcctggaatactttccttcgcagatgctgagaaccggcaacaacttccagtttacttacaccttcgaggacgtgcctttccacagcagctacgcccacagccagagcttggaccggctgatgaatcctctgattgaccagtacctgtactacttgtctcggactcaaacaacaggaggcacggcaaatacgcagactctgggcttcagccaaggtgggcctaatacaatggccaatcaggcaaagaactggctgccaggaccctgttaccgccaacaacgcgtctcaacgacaaccgggcaaaacaacaatagcaactttgcctggactgctgggaccaaataccatctgaatggaagaaattcattggctaatcctggcatcgctatggcaacacacaaagacgacgaggagcgtttttttcccagtaacgggatcctgatttttggcaaacaaaatgctgccagagacaatgcggattacagcgatgtcatgctcaccagcgaggaagaaatcaaaaccactaaccctgtggctacagaggaatacggtatcgtggcagataacttgcagcagcaaaacacggctcctcaaattggaactgtcaacagccagggggccttacccggtatggtctggcagaaccgggacgtgtacctgcagggtcccatctgggccaagattcctcacacggacggcaacttccacccctctcccctcatgggtggattcggacttaaacatcctccgcctcagatcctgatcaagaacacgcctgtacctgcggatcctccgaccaccttcaaccagtcaaagctgaactctttcatcacgcaatacagcaccggacaggtcagcgtggaaattgaatgggagctgcagaaggaaaacagcaagcgctggaaccccgagatccagtacacctccaactactacaaatctacaagtgtggactttgctgttaatacagaaggcgtgtactctgaaccccgccccattggcacccgttacctcacccgtaatctgtaa

SEQ ID NO: 2747 - protein, 738 aa, Artificial Sequence; identical to SEQ ID NO: 2493
  Synthetic polypeptide

SEQ ID NO: 2748 - DNA, 2211 bp, Artificial Sequence
  Synthetic polynucleotide
atggctgctgacggttatcttccagattggctcgaggacaacctttctgaaggcattcgagagtggtgggcgctgcaacctggagcccctaaacccaaggcaaatcaacaacatcaggacaacgctcggggtcttgtgcttccgggttacaaatacctcggacccggcaacggactcgacaagggggaacccgtcaacgcagcggacgcggcagccctcgagcacgacaaggcctacgaccagcagctcaaggccggtgacaacccctacctcaagtacaaccacgccgacgccgagttccaggagcggctcaaagaagatacgtcttttgggggcaacctcgggcgagcagtcttccaggccaaaaagaggcttcttgaacctcttggtctggttgaggaagcggctaagacggctcctggaaagaagaggcctgtagatcagtctcctcaggaaccggactcatcatctggtgttggcaaatcgggcaaacagcctgccagaaaaagactaaatttcggtcagactggcgactcagagtcagtcccagaccctcaacctctcggagaaccaccagcagcccccacaagtttgggatctaatacaatggcttcaggcggtggcgcaccaatggcagacaataacgagggtgccgatggagtgggtaattcctcaggaaattggcattgcgattcccaatggctgggcgacagagtcatcaccaccagcaccagaacctgggccctgcccacttacaacaaccatctctacaagcaaatctccagccaatcaggagcttcaaacgacaaccactactttggctacagcaccccttgggggtattttgactttaacagattccactgccacttctcaccacgtgactggcagcgactcattaacaacaactggggattccggcccaagaaactcagcttcaagctcttcaacatccaagttaaagaggtcacgcagaacgatggcacgacgactattgccaataaccttaccagcacggttcaggtgtttacggactcggagtatcagctcccgtacgtgctcgggtcggcgcaccaaggctgtctcccgccgtttccagcggacgtcttcatggtccctcagtatggatacctcaccctgaacaacggaagtcaagcggtgggacgctcatccttttactgcctggagtacttcccttcgcagatgctaaggactggaaataacttccaattcagctataccttcgaggatgtaccttttcacagcagctacgctcacagccagagtttggatcgcttgatgaatcctcttattgatcagtatctgtactacctgaacagaacgcaaggaacaacctctggaacaaccaaccaatcacggctgctttttagccaggctgggcctcagtctatgtctttgcaggccagaaattggctacctgggccctgctaccggcaacagagactttcaaagactgctaacgacaacaacaacagtaactttccttggacagcggccagcaaatatcatctcaatggccgcgactcgctggtgaatccaggaccagctatggccagtcacaaggacgatgaagaaaaatttttccctatgcacggcaatctaatatttggcaaagaagggacaacggcaagtaacgcagaattagataatgtaatgattacggatgaagaagagattcgtaccaccaatcctgtggcaacagagcagtatggaactgtggcaaataacttgcagagctcaaatacagctcccacgactagaactgtcaatgatcagggggccttacctggcatggtgtggcaagatcgtgacgtgtaccttcaaggacctatctgggcaaagattcctcacacggatggacactttcatccttctcctctgatgggaggctttggactgaaacatccgcctcctcaaatcatgatcaaaaatactccggtaccggcaaatcctccgacgactttcagcccggccaagtttgcttcatttatcactcagtactccactggacaggtcagcgtggaaattgagtgggagctacagaaagaaaacagcaaacgttggaatccagagattcagtacacttccaactacaacaagtctgttaatgtggactttactgtagacactaatggtgtttatagtgaacctcgccccattggcacccgttaccttacccgtcccctgtaa

SEQ ID NO: 2749 - protein, 736 aa, Artificial Sequence; identical to SEQ ID NO: 2719
  Synthetic polypeptide

SEQ ID NO: 2750 - DNA, 2211 bp, Artificial Sequence; identical to SEQ ID NO: 2718
  Synthetic polynucleotide

SEQ ID NO: 2751 - protein, 736 aa, Artificial Sequence; identical to SEQ ID NO: 2719
  Synthetic polypeptide

SEQ ID NO: 2752 - DNA, 2211 bp, Artificial Sequence
  Synthetic polynucleotide
atggctgctgacggttatcttccagattggctcgaggacaacctttctgaaggcattcgtgagtggtgggctctgaaacctggagtccctcaacccaaagcgaaccaacaacaccaggacaaccgtcggggtcttgtgcttccgggttacaaatacctcggacccggtaacggactcgacaaaggagagcccgtcaacgcggcggatgcagcggccctcgagcacgacaaggcctacgaccagcagctcaaagcgggtgacaatccgtacctgcggtataaccacgccgacgccgagtttcaggagcgtctgcaagaagatacgtcttttgggggcaacctcgggcgagcagtcttccaggccaagaagagggttctcgaaccttttggtctggttgaggaaggtgctaagacggctcctggaaagaaacgtccggtagagcagtcgccacaagagccagactcctcctcgggcatcggcaagacaggccagcagcccgctaaaaagagactcaattttggtcagactggcgactcagagtcagtccccgacccacaacctctcggagaacctccagcaacccccgctgctgtgggacctactacaatggcttcaggcggtggcgcaccaatggcagacaataacgaaggcgccgacggagtgggtaatgcctcaggaaattggcattgcgattccacatggctgggcgacagagtcatcaccaccagcacccgcacctgggccttgcccacctacaataaccacctctacaagcaaatctccagtgcttcaacgggggccagcaacgacaaccactacttcggctacagcaccccctgggggtattttgatttcaacagattccactgccatttctcaccacgtgactggcagcgactcatcaacaacaattggggattccggcccaagagactcaacttcaagctcttcaacatccaagtcaaggaggtcacgacgaatgatggcgtcacgaccatcgctaataaccttaccagcacggttcaagtcttctcggactcggagtaccagcttccgtacgtcctcggctctgcgcaccagggctgcctccctccgttcccggcggacgtgttcatgattccgcaatacggctacctgacgctcaacaatggcagccaagccgtgggacgttcatccttttactgcctggaatatttcccttctcagatgctgagaacgggcaacaactttaccttcagctacacctttgaggaagtgcctttccacagcagctacgcgcacagccagagcctggaccggctgatgaatcctctcatcgaccaatacctgtattacctgaacagaactcaaaatcagtccggaagtgcccaaaacaaggacttgctgtttagccgtgggtctccagctggcatgtctgttcagcccaaaaactggctacctggaccctgttatcggcagcagcgcgtttctaaaacaaaaacagacaacaacaacagcaattttacctggactggtgcttcaaaatataacctcaatgggcgtgaatccatcatcaaccctggcactgctatggcctcacacaaagacgacgaagacaagttctttcccatgagcggtgtcatgatttttggaaaagagagcgccggagcttcaaacactgcattggacaatgtcatgattacagacgaagaggaaattaaagccactaaccctgtggccaccgaaagatttgggaccgtggcagtcaatttccagagcagcagcacagaccctgcgaccggagatgtgcatgttatgggagccttacctggaatggtgtggcaagacagagacgtatacctgcagggtcctatttgggccaaaattcctcacacggatggacactttcacccgtctcctctcatgggcggctttggacttaagcacccgcctcctcagatcctcatcaaaaacacgcctgttcctgcgaatcctccggcagagttttcggctacaaagtttgcttcattcatcacccagtattccacaggacaagtgagcgtggagattgaatgggagctgcagaaagaaaacagcaaacgctggaatcccgaagtgcagtatacatctaactatgcaaaatctgccaacgttgatttcactgtggacaacaatggactttatactgagcctcgccccattggcacccgttacctcacccgtcccctgtaa

SEQ ID NO: 2753 - protein, 736 aa, Artificial Sequence
  Synthetic polypeptide
MAADGYLPDWLEDNLSEGIREWWALKPGVPQPKANQQHQDNRRGLVLPGYKYLGPGNGLDKGEPVNAADAAALEHDKAYDQQLKAGDNPYLRYNHADAEFQERLQEDTSFGGNLGRAVFQAKKRVLEPFGLVEEGAKTAPGKKRPVEQSPQEPDSSSGIGKTGQQPAKKRLNFGQTGDSESVPDPQPLGEPPATPAAVGPTTMASGGGAPMADNNEGADGVGNASGNWHCDSTWLGDRVITTSTRTWALPTYNNHLYKQISSASTGASNDNHYFGYSTPWGYFDFNRFHCHFSPRDWQRLINNNWGFRPKRLNFKLFNIQVKEVTTNDGVTTIANNLTSTVQVFSDSEYQLPYVLGSAHQGCLPPFPADVFMIPQYGYLTLNNGSQAVGRSSFYCLEYFPSQMLRTGNNFTFSYTFEEVPFHSSYAHSQSLDRLMNPLIDQYLYYLNRTQNQSGSAQNKDLLFSRGSPAGMSVQPKNWLPGPCYRQQRVSKTKTDNNNSNFTWTGASKYNLNGRESIINPGTAMASHKDDEDKFFPMSGVMIFGKESAGASNTALDNVMITDEEEIKATNPVATERFGTVAVNFQSSSTDPATGDVHVMGALPGMVWQDRDVYLQGPIWAKIPHTDGHFHPSPLMGGFGLKHPPPQILIKNTPVPANPPAEFSATKFASFITQYSTGQVSVEIEWELQKENSKRWNPEVQYTSNYAKSANVDFTVDNNGLYTEPRPIGTRYLTRPL

SEQ ID NO: 2754 - DNA, 2217 bp, Artificial Sequence
  Synthetic polynucleotide
atggctgccgatggttatcttccagattggctcgaggacaacctctctgagggcattcgcgagtggtgggacttgaaacctggagccccgaaacccaaagccaaccagcaaaagcaggacgacggccggggtctggtgcttcctggctacaagtacctcggacccttcaacggactcgacaagggggagcccgtcaacgcggcggatgcaacggccctcgagcacgacaaggcctacgaccagcagctgcaggcgggtgacaatccgtacctgcggtataaccacgccgacgccgagtttcaggagcgtctgcaagaagatacgtcttttgggggcaacctcgggcgagcagtcttccaggccaagaagcgggttctcgaacctctcggtctggttgaggaaggcgctaagacggctcctggaaagaagagaccggtagagccatcaccccagcgttctccagactcctctacgggcatcggcaagaaaggccaacagcccgccagaaaaagactcaattttggtcagactggcgactcagagtcagttccagaccctcaacctctcggagaaccaccagcagcccccacaagtttgggatctaatacaatggcttcaggcggtggcgcaccaatggcagacaataacgagggtgccgatggagtgggtaattcctcaggaaattggcattgcgattcccaatggctgggcgacagagtcatcaccaccagcacccgcacctgggccttgcccacctacaataaccacctctacaagcaaatctccagtgcttcaacgggggccagcaacgacaaccactacttcggctacagcaccccctgggggtattttgactttaaccgcttccactgccacttctcgccaagagactggcaaagactcatcaacaacaattggggattccggcccaagagactcaacttcaaactcttcaacatccaagtcaaggaggtcacgacgaatgatggcgtcacgaccatcgccaataacctcaccagcaccatccaggtgtttacggactcggagtaccagctgccgtacgttctcggctctgcccaccagggctgcctgcctccgttcccggcggacgtgttcatgattccccagtatggatacctcaccctgaacaacggaagtcaagcggtgggacgctcatccttttactgcctggagtacttcccttcgcagatgctaaggactggaaataacttccaattcagctataccttcgaggatgtaccttttcacagcagctacgctcacagccagagtttggatcgcttgatgaatcctcttattgatcagtatctgtactacctgaacagaacgcaaggaacaacctctggaacaaccaaccaatcacggctgctttttagccaggctgggcctcagtctatgtctttgcaggccagaaattggctacctgggccctgctaccggcaacagagactttcaaagactgctaacgacaacaacaacagtaactttccttggacagcagccagcaaatatcatctcaatggccgcgactcgctggtgaatccaggaccagctatggccagtcacaaggacgatgaagaaaaatttttccctatgcacggcaatctaatatttggcaaagaagggacaacggcaagtaacgcagaattagataatgtaatgattacggatgaagaagagattcgtaccaccaatcctgtggcaacagagcagtatggaactgtggcaaataacttgcagagctcaaatacagctcccacgactagaactgtcaatgatcagggggccttacctggcatggtgtggcaagatcgtgacgtgtaccttcaggggcccatctgggcaaagattccacacacggacggacattttcacccctctcccctcatgggtggattcggacttaaacaccctcctccgcagattctcatcaagaacaccccggtacctgcgaatccttcgaccaccttcagtgcggcaaagtttgcttccttcatcacacagtactccacgggacaggtcagcgtggagatcgagtgggagctgcagaaggaaaacagcaagcgctggaacccggagatccagtacacttccaactattacaagtctaataatgttgaatttgctgttaatactgaaggtgtatatagtgaaccccgccccattggcaccagatacctgactcgtaatctgtaa

SEQ ID NO: 2755 - protein, 738 aa, Artificial Sequence
  Synthetic polypeptide
MAADGYLPDWLEDNLSEGIREWWDLKPGAPKPKANQQKQDDGRGLVLPGYKYLGPFNGLDKGEPVNAADATALEHDKAYDQQLQAGDNPYLRYNHADAEFQERLQEDTSFGGNLGRAVFQAKKRVLEPLGLVEEGAKTAPGKKRPVEPSPQRSPDSSTGIGKKGQQPARKRLNFGQTGDSESVPDPQPLGEPPAAPTSLGSNTMASGGGAPMADNNEGADGVGNSSGNWHCDSQWLGDRVITTSTRTWALPTYNNHLYKQISSASTGASNDNHYFGYSTPWGYFDFNRFHCHFSPRDWQRLINNNWGFRPKRLNFKLFNIQVKEVTTNDGVTTIANNLTSTIQVFTDSEYQLPYVLGSAHQGCLPPFPADVFMIPQYGYLTLNNGSQAVGRSSFYCLEYFPSQMLRTGNNFQFSYTFEDVPFHSSYAHSQSLDRLMNPLIDQYLYYLNRTQGTTSGTTNQSRLLFSQAGPQSMSLQARNWLPGPCYRQQRLSKTANDNNNSNFPWTAASKYHLNGRDSLVNPGPAMASHKDDEEKFFPMHGNLIFGKEGTTASNAELDNVMITDEEEIRTTNPVATEQYGTVANNLQSSNTAPTTRTVNDQGALPGMVWQDRDVYLQGPIWAKIPHTDGHFHPSPLMGGFGLKHPPPQILIKNTPVPANPSTTFSAAKFASFITQYSTGQVSVEIEWELQKENSKRWNPEIQYTSNYYKSNNVEFAVNTEGVYSEPRPIGTRYLTRNL

SEQ ID NO: 2756 - DNA, 2208 bp, Artificial Sequence
  Synthetic polynucleotide
atggctgccgatggttatcttccagattggctcgaggacaaccttagtgaaggaattcgcgagtggtgggacttgaaacctggagccccgaagcccaaagccaaccagcaaaagcaggacgacggccggggtctggtgcttcctggctacaagtacctcggacccttcaacggactcgacaagggggagcccgtcaacgcggcggacgcagcggccctcgagcacgacaaggcctacgaccagcagctcaaagcgggtgacaatccgtacctgcggtataaccacgccgacgccgagtttcaggagcgtctgcaagaagatacgtcttttgggggcaacctcgggcgagcagtcttccaggccaagaagcgggttctcgaacctctcggtctggttgaggaaggtgctaagacggctcctggaaagaaacgtccggtagagcagtcgccacaagagccagactcctcctcgggcattggcaagacaggccagcagcccgctaaaaagagactcaattttggtcagactggcgactcagagtcagtccccgacccacaacctctcggagaacctccagcaacccccgctgctgtgggacctactacaatggcttcaggcggtggcgcaccaatggcagacaataacgaaggcgccgacggagtgggtaatgcctcaggaaattggcattgcgattccacatggctgggcgacagagtcatcaccaccagcacccgaacctgggccctgcccacctacaacaaccacctctacaaacaaatttccagccaatcaggagcctcgaacgacaatcactactttggctacagcaccccttgggggtattttgatttcaacagattccactgccacttttcaccacgtgactggcagcgactcatcaacaacaattggggattccggcccaagagactcagcttcaagctcttcaacatccaggtcaaggaggtcacgcagaatgaaggcaccaagaccatcgccaataaccttaccagcacggttcaagtgtttacggactcggagtatcagctcccgtacgtgctcggctcggcgcatcaaggatgcctcccgccgttcccagcagacgtcttcatggtgccacagtatggatacctcaccctgaacaacgggagtcaggcagtaggacgctcttcattttactgcctggagtactttccttctcagatgctgcgtaccggaaacaactttaccttcagctacacttttgaggacgttcctttccacagcagctacgctcacagccagagtctggaccgtctcatgaatcctctgattgaccagtacctgtattacttgagcagaacaaacactccaagtggaaccaccacgcagtcaaggcttcagttttctcaggccggagcgagtgacattcgggaccagtctaggaactggcttcctggaccctgttaccgccagcagcgagtatcaaagacatctgcggataacaacaacagtgaatactcgtggactggagctaccaagtaccacctcaatggcagagactctctggtgaatccgggcccggccatggcaagccacaaggactatgaagaaaagttttttcctcagagcggggttctcatctttgggaagcaaggctcagagaaaacaaatgtggacattgaaaaggtcatgattacagacgaagaggaaatcaggacaaccaatcccgtggctacggagcagtatggttctgtatctaccaacctccagagaggcaacagacaagcagctaccgcagatgtcaacacacaaggcgttcttccaggcatggtctggcaggacagagatgtgtaccttcaggggcccatctgggcaaagattccacacacggacggacattttcacccgtctccgctgatgggcggctttggcctgaaacatcctccgcctcagatcctgatcaagaacacgcctgtacctgcggatcctccgaccaccttcaaccagtcaaagctgaactctttcatcactcagtattctactggccaagtcagcgtggagatcgagtgggagctgcagaaggaaaacagcaagcgctggaaccccgagatccagtacacctccaactactacaaatctacaagtgtggactttgctgttaatacagaaggcgtgtactctgaaccccgccccattggcacccgttacctcacccgtaatctgtaa

SEQ ID NO: 2757 - protein, 735 aa, Artificial Sequence
  Synthetic polypeptide
MAADGYLPDWLEDNLSEGIREWWDLKPGAPKPKANQQKQDDGRGLVLPGYKYLGPFNGLDKGEPVNAADAAALEHDKAYDQQLKAGDNPYLRYNHADAEFQERLQEDTSFGGNLGRAVFQAKKRVLEPLGLVEEGAKTAPGKKRPVEQSPQEPDSSSGIGKTGQQPAKKRLNFGQTGDSESVPDPQPLGEPPATPAAVGPTTMASGGGAPMADNNEGADGVGNASGNWHCDSTWLGDRVITTSTRTWALPTYNNHLYKQISSQSGASNDNHYFGYSTPWGYFDFNRFHCHFSPRDWQRLINNNWGFRPKRLSFKLFNIQVKEVTQNEGTKTIANNLTSTVQVFTDSEYQLPYVLGSAHQGCLPPFPADVFMVPQYGYLTLNNGSQAVGRSSFYCLEYFPSQMLRTGNNFTFSYTFEDVPFHSSYAHSQSLDRLMNPLIDQYLYYLSRTNTPSGTTTQSRLQFSQAGASDIRDQSRNWLPGPCYRQQRVSKTSADNNNSEYSWTGATKYHLNGRDSLVNPGPAMASHKDYEEKFFPQSGVLIFGKQGSEKTNVDIEKVMITDEEEIRTTNPVATEQYGSVSTNLQRGNRQAATADVNTQGVLPGMVWQDRDVYLQGPIWAKIPHTDGHFHPSPLMGGFGLKHPPPQILIKNTPVPADPPTTFNQSKLNSFITQYSTGQVSVEIEWELQKENSKRWNPEIQYTSNYYKSTSVDFAVNTEGVYSEPRPIGTRYLTRNL

SEQ ID NO: 2758 - DNA, 2214 bp, Artificial Sequence
  Synthetic polynucleotide
atggctgccgatggttatcttccagattggctcgaggacaacctctctgagggcattcgcgagtggtgggacttgaaacctggagccccgaaacccaaagccaaccagcaaaagcaggacgacggccggggtctggtgcttcctggctacaagtacctcggacccttcaacggactcgacaagggggagcccgtcaacgcggcggatgcagcggccctcgagcacgacaaggcctacgaccagcagctcaaagcgggtgacaatccgtacctgcggtataaccacgccgacgccgagtttcaggagcgtctgcaagaagatacgtcttttgggggcaacctcgggcgagcagtcttccaggccaagaagagggttctcgaaccttttggtctggttgaggaaggtgctaagacggctcctggaaagaaacgtccggtagagcagtcgccacaagagccagactcctcctcgggcattggcaagacaggccagcagcctgcaagaaaaagattgaattttggtcagactggagacgcagactcagtacctgacccccagcctctcggacagccaccagcagccccctctggtctgggaactaatacgatggctacaggcagtggcgcaccaatggcagacaataacgagggcgccgacggagtgggtaattcctcgggaaattggcattgcgattcccaatggctgggggacagagtcatcaccaccagcacccgaacctgggccctgcccacctacaacaatcacctctacaagcaaatctccaacagcacatctggaggatcttcaaatgacaacgcctacttcggctacagcaccccctgggggtattttgatttcaacagattccactgccatttctcaccacgtgactggcagcgactcatcaacaacaattggggattccggcccaagagactcaacttcaagctcttcaacatccaggtcaaggaggtcacgcagaatgaaggcaccaagaccatcgccaataacctcaccagcaccatccaggtgtttacggactcggagtaccagctgccgtacgttctcggctctgcccaccagggctgcctgcctccgttcccggcggacgtgttcatgattccccagtacggctacctaacactcaacaacggtagtcaggccgtgggacgctcctccttctactgcctggaatactttccttcgcagatgctgagaaccggcaacaacttccagtttacttacaccttcgaggacgtgcctttccacagcagctacgcccacagccagagcttggaccggctgatgaatcctctgattgaccagtacctgtactacttgtctcggactcaaacaacaggaggcacgacaaatacgcagactctgggcttcagccaaggtgggcctaatacaatggccaatcaggcaaagaactggctgccaggaccctgttaccgccagcagcgagtatcaaagacatttgcggataacaacaacagtgaatactcgtggactggagctaccaagtaccacctcaatggcagagactctctggtgaatccgggcccggccatggcaagccacaaggacgatgaagaaaagttttttcctcagagcggggttctcatctttgggaagcaaggctcagagaaaacaaatgtggacattgaaaaggtcatgattacagacgaagaggaaatcaggacaaccaatcccgtggctacggagcagtatggttctgtatctaccaacctccagagaggcaacagacaagcagctaccgcagatgtcaacacacaaggcgttcttccaggcatggtctggcaggacagagatgtgtaccttcaggggcccatctgggcaaagattccacacacggacggacattttcacccctctcccctcatgggtggattcggacttaaacaccctccgcctcagatcctgatcaagaacacgcctgtacccgcggatcctccgaccaccttcaaccagtcaaagctgaactctttcatcacccagtattctactggccaagtcagcgtggagatcgagtgggagctgcagaaggaaaacagcaagcgctggaaccccgagatccagtacacctccaactactacaaatctacaagtgtggactttgctgttaatacagaaggcgtgtactctgaaccccgccccattggcacccgttacctcacccgtaatctgtaa

SEQ ID NO: 2759 - protein, 737 aa, Artificial Sequence
  Synthetic polypeptide
MAADGYLPDWLEDNLSEGIREWWDLKPGAPKPKANQQKQDDGRGLVLPGYKYLGPFNGLDKGEPVNAADAAALEHDKAYDQQLKAGDNPYLRYNHADAEFQERLQEDTSFGGNLGRAVFQAKKRVLEPFGLVEEGAKTAPGKKRPVEQSPQEPDSSSGIGKTGQQPARKRLNFGQTGDADSVPDPQPLGQPPAAPSGLGTNTMATGSGAPMADNNEGADGVGNSSGNWHCDSQWLGDRVITTSTRTWALPTYNNHLYKQISNSTSGGSSNDNAYFGYSTPWGYFDFNRFHCHFSPRDWQRLINNNWGFRPKRLNFKLFNIQVKEVTQNEGTKTIANNLTSTIQVFTDSEYQLPYVLGSAHQGCLPPFPADVFMIPQYGYLTLNNGSQAVGRSSFYCLEYFPSQMLRTGNNFQFTYTFEDVPFHSSYAHSQSLDRLMNPLIDQYLYYLSRTQTTGGTTNTQTLGFSQGGPNTMANQAKNWLPGPCYRQQRVSKTFADNNNSEYSWTGATKYHLNGRDSLVNPGPAMASHKDDEEKFFPQSGVLIFGKQGSEKTNVDIEKVMITDEEEIRTTNPVATEQYGSVSTNLQRGNRQAATADVNTQGVLPGMVWQDRDVYLQGPIWAKIPHTDGHFHPSPLMGGFGLKHPPPQILIKNTPVPADPPTTFNQSKLNSFITQYSTGQVSVEIEWELQKENSKRWNPEIQYTSNYYKSTSVDFAVNTEGVYSEPRPIGTRYLTRNL

SEQ ID NO: 2760 - DNA, 2217 bp, Artificial Sequence
  Synthetic polynucleotide
atggctgccgatggttatcttccagattggctcgaggacactctctctgaaggaataagacagtggtgggcgctgaaacctggagccccgaagcccaaagccaaccagcaaaagcaggacgacggccggggtctggtgcttcctggctacaagtacctcggacccttcaacggactcgacaagggggagcccgtcaacgcggcggatgcagcggccctcgagcacgacaaggcctacgaccagcagctcaaagcgggtgacaatccgtacctgcggtataaccacgccgacgccgagtttcaggagcgtctgcaagaagatacgtcttttgggggcaacctcgggcgagcagtcttccaggccaagaagcgggttctcgaacctctcggtctggttgaggaaggcgctaagacggctcctggaaagaagagaccggtagagccatcaccccagcgttctccagactcctctacgggcatcggcaagaaaggccaacagcccgccagaaaaagactcaattttggtcagactggcgactcagagtcagttccagaccctcaacctctcggagaaccaccagcagcccccacaagtttgggatctaatacaatggcttcaggcggtggcgcaccaatggcagacaataacgagggtgccgatggagtgggtaattcctcaggaaattggcattgcgattcccaatggctgggcgacagagtcatcaccaccagcacccgcacctgggccttgcccacctacaataaccacctctacaagcaaatctccagtgcttcaacgggggccagcaacgacaaccactacttcggctacagcaccccctgggggtattttgactttaaccgcttccactgccacttctcgccaagagactggcaaagactcatcaacaacaattggggattccggcccaagagactcaacttcaaactcttcaacatccaagtcaaggaggtcacgacgaatgatggcgtcacgaccatcgccaataacctcaccagcaccatccaggtgtttacggactcggagtaccagctgccgtacgttctcggctctgcccaccagggctgcctgcctccgttcccggcggacgtgttcatgattccccagtatggatacctcaccctgaacaacggaagtcaagcggtgggacgctcatccttttactgcctggagtacttcccttcgcagatgctaaggactggaaataacttccaattcagctataccttcgaggatgtaccttttcacagcagctacgctcacagccagagtttggatcgcttgatgaatcctcttattgatcagtatctgtactacctgaacagaacgcaaggaacaacctctggaacaaccaaccaatcacggctgctttttagccaggctgggcctcagtctatgtctttgcaggccagaaattggctacctgggccctgctaccggcaacagagactttcaaagactgctaacgacaacaacaacagtaactttccttggacagcagccagcaaatatcatctcaatggccgcgactcgctggtgaatccaggaccagctatggccagtcacaaggacgatgaagaaaaatttttccctatgcacggcaatctaatatttggcaaagaagggacaacggcaagtaacgcagaattagataatgtaatgattacggatgaagaagagattcgtaccaccaatcctgtggcaacagagcagtatggaactgtggcaaataacttgcagagctcaaatacagctcccacgactagaactgtcaatgatcagggggccttacctggcatggtgtggcaagatcgtgacgtgtaccttcaggggcccatctgggcaaagattccacacacggacggacattttcacccctctcccctcatgggtggattcggacttaaacaccctcctccgcagattctcatcaagaacaccccggtacctgcgaatccttcgaccaccttcagtgcggcaaagtttgcttccttcatcacacagtactccacgggacaggtcagcgtggagatcgagtgggagctgcagaaggaaaacagcaagcgctggaacccggagatccagtacacttccaactattacaagtctaataatgttgaatttgctgttaatactgaaggtgtatatagtgaaccccgccccattggcaccagatacctgactcgtaatctgtaa

SEQ ID NO: 2761 - protein, 738 aa, Artificial Sequence
  Synthetic polypeptide
MAADGYLPDWLEDTLSEGIRQWWALKPGAPKPKANQQKQDDGRGLVLPGYKYLGPFNGLDKGEPVNAADAAALEHDKAYDQQLKAGDNPYLRYNHADAEFQERLQEDTSFGGNLGRAVFQAKKRVLEPLGLVEEGAKTAPGKKRPVEPSPQRSPDSSTGIGKKGQQPARKRLNFGQTGDSESVPDPQPLGEPPAAPTSLGSNTMASGGGAPMADNNEGADGVGNSSGNWHCDSQWLGDRVITTSTRTWALPTYNNHLYKQISSASTGASNDNHYFGYSTPWGYFDFNRFHCHFSPRDWQRLINNNWGFRPKRLNFKLFNIQVKEVTTNDGVTTIANNLTSTIQVFTDSEYQLPYVLGSAHQGCLPPFPADVFMIPQYGYLTLNNGSQAVGRSSFYCLEYFPSQMLRTGNNFQFSYTFEDVPFHSSYAHSQSLDRLMNPLIDQYLYYLNRTQGTTSGTTNQSRLLFSQAGPQSMSLQARNWLPGPCYRQQRLSKTANDNNNSNFPWTAASKYHLNGRDSLVNPGPAMASHKDDEEKFFPMHGNLIFGKEGTTASNAELDNVMITDEEEIRTTNPVATEQYGTVANNLQSSNTAPTTRTVNDQGALPGMVWQDRDVYLQGPIWAKIPHTDGHFHPSPLMGGFGLKHPPPQILIKNTPVPANPSTTFSAAKFASFITQYSTGQVSVEIEWELQKENSKRWNPEIQYTSNYYKSNNVEFAVNTEGVYSEPRPIGTRYLTRNL

SEQ ID NO: 2762 - DNA, 2208 bp, Artificial Sequence; identical to SEQ ID NO: 2398
  Synthetic polynucleotide

SEQ ID NO: 2763 - protein, 735 aa, Artificial Sequence [sequence omitted]

SEQ ID NO: 2764 - DNA, 2208 bp, Artificial Sequence
  Synthetic polynucleotide
atggctgccgatggttatcttccagattggctcgaggacaacctctctgagggcattcgcgagtggtgggcgctgaaacctggagccccgaagcccaaagccaaccagcaaaagcaggacgacggccggggtctggtgcttcctggctacaagtacctcggacccttcaacggactcgacaagggggagcccgtcaacgcggcggacgccgcggccctcgagcacgacaaggcctacgaccagcagctgcaggcgggtgacaatccgtacctgcggtataaccacgccgacgccgagtttcaggagcgtctgcaagaagatacgtcttttgggggcaacctcgggcgagcagtcttccaggccaaaaagaggcttcttgaacctcttggtctggttgaggaagcagctaaaacggctcctggaaagaagaggcctgtagagcagtctcctcaggaaccggactcctccgcgggtattggcaaatcgggtgcacagcccgccaaaaagagactcaatttcggtcagactggcgactcagagtcagtcccagaccctcaacctctcggagaaccaccagcagcccccacaagtttgggatctaatacaatggcttcaggcggtggcgcaccaatggcagacaataacgaaggcgccgacggagtgggtaatgcctcaggaaattggcattgcgattccacatggctgggcgacagagtcatcaccaccagcacccgcacctgggccttgcccacctacagcaaccatctctacaagcaaatctccagccaatcaggagcttcaaacgacaacgactactttggctacagcaccccttgggggtattttgatttcaacagattccactgccacttttcaccacgtgactggcaaagactcatcaacaacaactggggattccgacccaagagactcaacttcaagctctttaacattcaagtcaaagaggtcacgcagaatgacggtacgacgacgattgccaataaccttaccagcacggttcaggtgtttactgactcggagtaccagctcccgtacgtcctcggctcggcgcatcaaggatgcctcccgccgttcccagcagacgtcttcatggtgccacagtatggatacctcaccctgaacaacgggagtcaggcagtaggacgctcttcattttactgcctggagtactttccttctcagatgctgcgtaccggaaacaactttaccttcagctacacttttgaggacgttcctttccacagcagctacgctcacagccagagtctggaccgtctcatgaatcctctcatcgaccagtacctgtattacttgagcagaacaaacactccaagtggaaccaccacgcagtcaaggcttcagttttctcaggccggagcgagtgacattcgggaccagtctaggaactggcttcctggaccctgttaccgccagcagcgagtatcaaagacatctgaggataacaacaacagtgaatactcgtggactggagctaccaagtaccacctcaatggcagagactctctggtgaatccgggcccggccatggcaagccacaaggacgatgaagaaaagttttttcctcagagcggggttctcatctttgggaagcaaggctcagagaaaacaaatgtggacattgaaaaggtcatgattacagacgaagaggaaatcaggacaaccaatcccgtggctacggagcagtatggttctgtatctaccaacctccagagaggcaacagacaagcagctaccgcagatgtcaacacacaaggcgttcttccaggcatggtctggcaggacagagatgtgtaccttcaggggcccatctgggcaaagattccacacacggacggacattttcacccctctcccctcatgggtggattcggacttaaacaccctcctccacagattctcatcaagaacaccccggtacctgcgaatccttcgaccaccttcagtgcggcaaagtttgcttccttcatcacacagtactccacgggacaggtcagcgtggagatcgagtgggagctgcagaaggaaaacagcaaacgctggaatcccgaaattcagtacacttccaactacaacaagtctgttaatgtggactttactgtggacactaatggcgtgtattcagagcctcgccccattggcaccagatacctgactcgtaatctgtaa

SEQ ID NO: 2765 - protein, 735 aa, Artificial Sequence
  Synthetic polypeptide
MAADGYLPDWLEDNLSEGIREWWALKPGAPKPKANQQKQDDGRGLVLPGYKYLGPFNGLDKGEPVNAADAAALEHDKAYDQQLQAGDNPYLRYNHADAEFQERLQEDTSFGGNLGRAVFQAKKRLLEPLGLVEEAAKTAPGKKRPVEQSPQEPDSSAGIGKSGAQPAKKRLNFGQTGDSESVPDPQPLGEPPAAPTSLGSNTMASGGGAPMADNNEGADGVGNASGNWHCDSTWLGDRVITTSTRTWALPTYSNHLYKQISSQSGASNDNDYFGYSTPWGYFDFNRFHCHFSPRDWQRLINNNWGFRPKRLNFKLFNIQVKEVTQNDGTTTIANNLTSTVQVFTDSEYQLPYVLGSAHQGCLPPFPADVFMVPQYGYLTLNNGSQAVGRSSFYCLEYFPSQMLRTGNNFTFSYTFEDVPFHSSYAHSQSLDRLMNPLIDQYLYYLSRTNTPSGTTTQSRLQFSQAGASDIRDQSRNWLPGPCYRQQRVSKTSEDNNNSEYSWTGATKYHLNGRDSLVNPGPAMASHKDDEEKFFPQSGVLIFGKQGSEKTNVDIEKVMITDEEEIRTTNPVATEQYGSVSTNLQRGNRQAATADVNTQGVLPGMVWQDRDVYLQGPIWAKIPHTDGHFHPSPLMGGFGLKHPPPQILIKNTPVPANPSTTFSAAKFASFITQYSTGQVSVEIEWELQKENSKRWNPEIQYTSNYNKSVNVDFTVDTNGVYSEPRPIGTRYLTRNL

SEQ ID NO: 2766 - DNA, 2208 bp, Artificial Sequence
  Synthetic polynucleotide
atggctgccgatggttatcttccagattggctcgaggacaacctctctgagggcattcgcgagtggtgggcgctgaaacctggagccccgaagcccaaagccaaccagcaaaagcaggacgacggccggggtctggtgcttcctggctacaagtacctcggacccttcaacggactcgacaagggggagcccgtcaacgcggcggacgcagcggccctcgagcacgacaaggcctacgaccagcagctgcaggcgggtgacaatccgtacctgcggtataaccacgccgacgccgagttccaggagcgtctgcaagaagatacgtcttttgggggcaacctcgggcgagcagtcttccaggccaagaagagggttctcgaaccttttggtctggttgaggaaggtgctaagacggctcctggaaagaaacgtccggtagagcagtcgccacaagagccagactcctcctcgggcattggcaagacaggccagcagcccgctaaaaagagactcaattttggtcagactggcgactcagagtcagtcccagaccctcaacctctcggagaaccaccagcagcccccacaagtttgggatctaatacaatggcttcaggcggtggcgcaccaatggcagacaataacgagggcgccgacggagtgggtaattcctcgggaaattggcattgcgattccacatggatgggcgacagagtcatcaccaccagcacccgaacctgggccctgcccacctacaacaaccacctctacaaacaaatttccagccaatcaggagcttcaaacgacaaccactactttggctacagcaccccttgggggtattttgactttaacagattccactgccacttttcaccacgtgactggcagcgactcattaacaacaactggggattccggcccaagaaactcaacttcaagctctttaacatccaggtcaaggaggtcacgcagaatgaaggcaccaagaccatcgccaataacctcaccagcaccatccaggtgtttacggactcggagtaccagctgccgtacgttctcggctctgcccaccagggctgcctgcctccgttcccggcggacgtgttcatgattccccagtacggctacctaacactcaacaacggtagtcaggccgtgggacgctcctccttctactgcctggaatactttccttcgcagatgctgagaaccggcaacaacttccagtttacttacaccttcgaggacgtgcctttccacagcagctacgcccacagccagagcttggaccggctgatgaatcctctgattgaccagtacctgtattacttgtctcggactcaaacaacaggaggcacgacaaatacgcagactctgggcttcagccaaggtgggcctaatacaatggccaatcaggcaaagaactggctgcctggaccctgttaccgccagcagcgagtatcaaagacatctgcggataacaacaacagtgaatactcgtggactggagctaccaagtaccacctcaatggcagagactctctggtgaatccgggcccggccatggcaagccacaaggacgatgaagaaaagttttttcctcagagcggggttctcatctttgggaagcaaggctcagagaaaacaaatgtggacattgaaaaggttatgattacagacgaagaggaaatcaggacaaccaatcccgtggctacggagcagtatggttctgtatctaccaacctccagagaggcaacagacaagcagctaccgcagatgtcaacacacagggcgttcttccaggcatggtctggcaggacagagatgtgtaccttcagggtcccatttgggccaaaattcctcacacagatggacactttcacccgtcccctcttatgggcggctttggactcaagaacccgcctcctcagatcctcatcaaaaacacgcctgttcctgcgaatcctccggcagagttttcagctacaaagtttgcttcattcatcacccaatactccacaggacaagtgagtgtggaaattgaatgggagctgcagaaagaaaacagcaagcgctggaatcccgaagtgcagtacacatccaattatgcaaaatctgccaacgttgattttactgtggacactaatggcgtgtattcagagcctcgccccattggcaccagatacctcacccgtaatctgtaa

SEQ ID NO: 2767 - protein, 735 aa, Artificial Sequence
  Synthetic polypeptide
MAADGYLPDWLEDNLSEGIREWWALKPGAPKPKANQQKQDDGRGLVLPGYKYLGPFNGLDKGEPVNAADAAALEHDKAYDQQLQAGDNPYLRYNHADAEFQERLQEDTSFGGNLGRAVFQAKKRVLEPFGLVEEGAKTAPGKKRPVEQSPQEPDSSSGIGKTGQQPAKKRLNFGQTGDSESVPDPQPLGEPPAAPTSLGSNTMASGGGAPMADNNEGADGVGNSSGNWHCDSTWMGDRVITTSTRTWALPTYNNHLYKQISSQSGASNDNHYFGYSTPWGYFDFNRFHCHFSPRDWQRLINNNWGFRPKKLNFKLFNIQVKEVTQNEGTKTIANNLTSTIQVFTDSEYQLPYVLGSAHQGCLPPFPADVFMIPQYGYLTLNNGSQAVGRSSFYCLEYFPSQMLRTGNNFQFTYTFEDVPFHSSYAHSQSLDRLMNPLIDQYLYYLSRTQTTGGTTNTQTLGFSQGGPNTMANQAKNWLPGPCYRQQRVSKTSADNNNSEYSWTGATKYHLNGRDSLVNPGPAMASHKDDEEKFFPQSGVLIFGKQGSEKTNVDIEKVMITDEEEIRTTNPVATEQYGSVSTNLQRGNRQAATADVNTQGVLPGMVWQDRDVYLQGPIWAKIPHTDGHFHPSPLMGGFGLKNPPPQILIKNTPVPANPPAEFSATKFASFITQYSTGQVSVEIEWELQKENSKRWNPEVQYTSNYAKSANVDFTVDTNGVYSEPRPIGTRYLTRNL

SEQ ID NO: 2768 - DNA, 2214 bp, Artificial Sequence; identical to SEQ ID NO: 2758
  Synthetic polynucleotide

SEQ ID NO: 2769 - protein, 737 aa, Artificial Sequence; identical to SEQ ID NO: 2759
  Synthetic polypeptide

SEQ ID NO: 2770 - DNA, 2196 bp, Artificial Sequence
  Synthetic polynucleotide
atggctgctgacggttatcttccagattggctcgaggacaacctctctgagggcattcgcgagtggtgggcgctgaaacctggagccccgcaacccaaagccaaccagcaaaagcaggacgacggccggggtctggtgcttcctggctacaagtacctcggacccttcaacggactcgacaagggggagcccgtcaacgaggcggacgccgcggccctcgagcacgacaaggcctacgaccagcagctcaaagcgggtgacaatccgtacctgcggtataatcacgccgacgccgagtttcaagagcgtctgcaagaagatacgtcctttgggggcaacctcgggcgagcagtcttccaggccaaaaagagggtactcgagcctctgggtctggttgaggaaggcgctaagacggctcctggaaagaagcggccagtagaaccggactccagctcgggcatcggcaagtcaggccagcagcccgcgaaaaagagactgaattttgggcagactggcgactcagagtcagtgcctgacccccaacctctctcagaaccacccgcaggtccctctggtctgggatctggtacaatggctgctggcggtggcgctccaatggcagacaataacgaaggcgccgacggagtgggtaatgtctcaggaaattggcattgcgattccacatggctgggcgaccgagtcatcaccaccagcactcggacctgggccctccccacctacaacaaccacctctacaagcaaatctccaacgggacctcgggaggcagcagcaacgacaacacctactttggctacagcaccccctgggggtattttgactttaacagattccactgccacttttcaccacgtgactggcagcgactcatcaacaacaactgggggttccggcccaagaagctcaacttcaagctcttcaacatccaggtcaaggaggtcacccagaatgaaggcaccaagaccatcgccaataacctcaccagcacggtgcaggtctttacggactcggagtaccagctcccgtacgtgctcggctctgcccaccagggctgcctgcctccgttcccggcggacgtgttcatgattccgcagtacgggtacctgacgctgaacaacgggagccaggccgtggggcgatcctccttctactgcctggagtactttccctcgcagatgctgagaacgggcaacaactttaccttcagctacaccttcgaggacgtgcccttccacagcagctacgcgcacagccagagcctggaccggctgatgaacccgctgattgaccagtacctgtactacctgtctcggactcagaccaacgggaccaatgccacgcagactctgttgtttgctcaggccgggcctcagaacatgtcggctcaggccaagaactggctgcctggtccttgctatcggcagcagcgcgtctctacgacagtgtcgcaaaacaacaacagcaactttacctggaccggggcgaccaagtaccacctgaacggccgagactccctggtgagccccggtgtcgccatggcaacgcacaaggacgacgaggagcgcttcttcccgagcagcggggtcctgatgtttggcaagcagggcgctggaaaggacaatgtcgagtacaccaacgtgatgctcaccagcgaggaggagatcaagaccaccaaccctgtggccacggagcagtacggcgtggtggctgacaatctgcagcagaccaactcagctcccattgtgggggcagtcaacagccagggggccttacccggtatggtctggcagaaccgggacgtgtacctgcagggtcccatctgggccaagatcccgcatacggacggcaactttcacccgtctcctctcatgggcggctttggactgaaacacccgcctccccagatcctgatcaaaaacacgccggtacctgcggatcccccggtgaactttacggacgctaagctggcgagtttcatcacgcagtacagcaccgggcaggtcagcgtggagattgagtgggagctgcagaaggagaacagcaagcgctggaatcccgagattcagtacacttccaattattataaatcagctaatgtggactttgccgtcaatgcagatggtgtatatagtgaaccccgccccattggcactcgttacctcacccgtaatctgtaa

SEQ ID NO: 2771 - protein, 731 aa, Artificial Sequence
  Synthetic polypeptide
MAADGYLPDWLEDNLSEGIREWWALKPGAPQPKANQQKQDDGRGLVLPGYKYLGPFNGLDKGEPVNEADAAALEHDKAYDQQLKAGDNPYLRYNHADAEFQERLQEDTSFGGNLGRAVFQAKKRVLEPLGLVEEGAKTAPGKKRPVEPDSSSGIGKSGQQPAKKRLNFGQTGDSESVPDPQPLSEPPAGPSGLGSGTMAAGGGAPMADNNEGADGVGNVSGNWHCDSTWLGDRVITTSTRTWALPTYNNHLYKQISNGTSGGSSNDNTYFGYSTPWGYFDFNRFHCHFSPRDWQRLINNNWGFRPKKLNFKLFNIQVKEVTQNEGTKTIANNLTSTVQVFTDSEYQLPYVLGSAHQGCLPPFPADVFMIPQYGYLTLNNGSQAVGRSSFYCLEYFPSQMLRTGNNFTFSYTFEDVPFHSSYAHSQSLDRLMNPLIDQYLYYLSRTQTNGTNATQTLLFAQAGPQNMSAQAKNWLPGPCYRQQRVSTTVSQNNNSNFTWTGATKYHLNGRDSLVSPGVAMATHKDDEERFFPSSGVLMFGKQGAGKDNVEYTNVMLTSEEEIKTTNPVATEQYGVVADNLQQTNSAPIVGAVNSQGALPGMVWQNRDVYLQGPIWAKIPHTDGNFHPSPLMGGFGLKHPPPQILIKNTPVPADPPVNFTDAKLASFITQYSTGQVSVEIEWELQKENSKRWNPEIQYTSNYYKSANVDFAVNADGVYSEPRPIGTRYLTRNL

SEQ ID NO: 2772 - DNA, 2196 bp, Artificial Sequence
  Synthetic polynucleotide
atggctgctgacggttatcttccagattggctcgaggacaacctctctgagggcattcgcgagtggtgggcgctgaaacctggagccccgcaacccaaagccaaccagcaaaagcaggacgacggccggggtctggtgcttcctggctacaagtacctcggacccttcaacggactcgacaagggggagcccgtcaacgaggcggacgccgcggccctcgagcacgacaaggcctacgaccagcagctcaaagcgggtgacaatccgtacctgcggtataatcacgccgacgccgagtttcaagagcgtctgcaagaagatacgtcctttgggggcaacctcgggcgagcagtcttccaggccaaaaagagggtactcgagcctctgggtctggttgaggaaggcgctaagacggctcctggaaagaagcggccagtagaaccggactccagctcgggcatcggcaagtcaggccggcagcccgcgaaaaagagactgaattttgggcagactggcgactcagagtcagtgcctgacccccaacctctctcagaaccacccgcaggtccctctggtctgggatctggtacaatggctgcaggcggtggcgctccaatggcagacaataacgaaggcgccgacggagtgggtaatgcctcaggaaattggcattgcgattccacatggctgggcgaccgagtcatcaccaccagcactcggacctgggccctccccacctacaacaaccacctctacaagcaaatctccaacgggacctcgggaggcagcagcaacgacaacacctactttggctacagcaccccctgggggtattttgactttaacagattccactgccacttttcaccacgtgactggcagcgactcatcaacaacaactggggattccggcccaagaggctcaacttcaagctcttcaacatccaggtcaaggaggtcacccagaatgaaggcaccaagaccatcgccaataacctcaccagcacggtgcaggtctttacggactcgaagtaccagctcccgtacgtgctcggctctgcccaccagggctgcctgcctccgttcccggcggacgtgttcatgattccgcagtacgggtacctgacgctgaacaacgggagccaggccgtggggcgatcctccttctactgcctggagtactttccctcgcagatgctgagaacgggcaacaactttaccttcagctacaccttcgaggacgtgcccttccacagcagctacgcgcacagccagagcctggaccggctgatgaacccgctgattgaccagtacctgtactacctgtctcggactcagaccaacgggaccaatgccacgcagactctgttgtttgctcaggccgggcctcagaacatgtcggctcaggccaagaactggctgcctggtccttgctatcggcagcagcgcgtctctacgacagtgtcgcaaaacaacaacagcaactttacctggaccggggcgaccaagtaccacctgaacggccgagactccctggtgaaccccggtgtcgccatggcaacgcacaaggacgacgaggagcgcttcttcccgagcagcggggtcctgatgtttggcaagcagggcgctggaaaggacaatgtcgagtacaccaacgtgatgctcaccagcgaggaggagatcaagaccaccaaccctgtggccacggagcagtacggtgtggtggctgacaatctgcagcagaccaactcggctcccattgtgggggcagtcaacagccagggggccttacccggtatggtctggcagaaccgggacgtgtacctgcagggtcccatctgggccaagatcccgcatacggacggcaactttcacccgtctcctctcatgggcggctttggactgaaacacccgcctccccagatcctgatcaaaaacacgccggtacctgcggatcccccggtgaactttacggacgctaagctggcgagtttcatcacgcagtacagcaccgggcaggtcagcgtggagattgagtgggagctgcagaaggagaacagcaagcgctggaatcccgagattcagtacacttccaattattataaatcagctaatgtggactttgccgtcaatgcagatggtgtatatagtgaaccccgccccattggcactcgttacctcacccgtaatctgtaa

SEQ ID NO: 2773 - protein, 731 aa, Artificial Sequence
  Synthetic polypeptide
MAADGYLPDWLEDNLSEGIREWWALKPGAPQPKANQQKQDDGRGLVLPGYKYLGPFNGLDKGEPVNEADAAALEHDKAYDQQLKAGDNPYLRYNHADAEFQERLQEDTSFGGNLGRAVFQAKKRVLEPLGLVEEGAKTAPGKKRPVEPDSSSGIGKSGRQPAKKRLNFGQTGDSESVPDPQPLSEPPAGPSGLGSGTMAAGGGAPMADNNEGADGVGNASGNWHCDSTWLGDRVITTSTRTWALPTYNNHLYKQISNGTSGGSSNDNTYFGYSTPWGYFDFNRFHCHFSPRDWQRLINNNWGFRPKRLNFKLFNIQVKEVTQNEGTKTIANNLTSTVQVFTDSKYQLPYVLGSAHQGCLPPFPADVFMIPQYGYLTLNNGSQAVGRSSFYCLEYFPSQMLRTGNNFTFSYTFEDVPFHSSYAHSQSLDRLMNPLIDQYLYYLSRTQTNGTNATQTLLFAQAGPQNMSAQAKNWLPGPCYRQQRVSTTVSQNNNSNFTWTGATKYHLNGRDSLVNPGVAMATHKDDEERFFPSSGVLMFGKQGAGKDNVEYTNVMLTSEEEIKTTNPVATEQYGVVADNLQQTNSAPIVGAVNSQGALPGMVWQNRDVYLQGPIWAKIPHTDGNFHPSPLMGGFGLKHPPPQILIKNTPVPADPPVNFTDAKLASFITQYSTGQVSVEIEWELQKENSKRWNPEIQYTSNYYKSANVDFAVNADGVYSEPRPIGTRYLTRNL

SEQ ID NO: 2774 - DNA, 2196 bp, Artificial Sequence
  Synthetic polynucleotide
atggctgctgacggttatcttccagattggctcgaggacaacctctctgagggcattcgcgagtggtgggcgctgaaacctggagccccgcaacccaaagccaaccagcaaaagcaggacgacggccggggtctggtgcttcctggctacaagtacctcggacccttcaacggactcgacaagggggagcccgtcaacgaggcggacgccgcggccctcgagcacgacaaggcctacgaccagcagctcaaagcgggtgacaatccgtacctgcggtataatcacgccgacgccgagtttcaagagcgtctgcaagaagatacgtcctttgggggcaacctcgggcgagcagtcttccaggccaaaaagagggtactcgagcctctgggtctggttgaggaaggcgctaagacggctcctggaaagaagcggccagtagaaccggactccagctcgggcatcggcaagtcaggccagcagcccgcgaaaaagagactgaattttgggccgactggcgactcagagtcagtgcctgacccccaacctctctcagaaccacctgcaggtccctctggtctgggatctggtacaatggctgcaggcggtggcgctccaatggcagacaataacgaaggcgccgacggagtgggtaatgtctcaggaaattggcattgcgattccacatggctgggcgaccgagtcatcaccaccagcactcggacctgggccctccccacctacaacaaccacctctacaagcaaatctccaacgggacctcgggaggcagcagcaacgacaacacctactttggctacagcaccccctgggggtattttgactttaacagattccactgccacttttcaccacgcgactggcagcgactcatcaacaacaactggggattccggcccaagaagctcaacttcaagctcttcaacatccaggtcaaggaggtcacccagaatgaaggcaccaagaccaccgccaataacctcaccagcacggtgcaggtctttacggactcggagtaccagctcccgtacgtgctcggctctgcccaccagggctgcctgcctccgttcccggcggacgtgttcatgattccgcagtacgggtacctgacgctgaacaacgggagccaggccgtggggcgatcctccttctactgcctggagtactttccctcgcagatgctgagaacgggcaacaactttaccttcagctacaccttcgaggacgtgcccttccacagcagctacgcgcacagccagagcctggaccggctgatgaacccgctgattgaccagtacctgtactacctgtctcggactcagaccaacgggaccaatgccacgcagactctgttgtttgctcaggccgggcctcagaacatgtcggctcaggccaagaactggctgcctggtccttgctatcggcagcagcgcgtctctacggcagtgtcgcaaaacaacaacagcaactttacctggaccggggcgaccaagtaccacctgaacggccgagactccctggtgaaccccggtgtcgccatggcaacgcacaaggacgacgaggagcgcttcttcccgagcagcggggtcctgatgtttggcaagcagggcgctggaaaggacaatgtcgagtacaccaacgtgatgctcaccagcgaggaggagatcaagaccaccaaccctgtggccacggagcagtacggtgtggtggctgacaatctgcagcagaccaactcggctcccattgtgggggcagtcaacagccagggggccttacccggtatggtctggcagaaccgggacgtgtacctgcagggtcccatctgggccaagatcccgcatacggacggcaactttcacccgtctcctctcatgggcggctttggactgaaacacccgcctccccagatcctgatcaaaaacacgccggtacctgcggatcccccggtgaactttacggacgctaagctggcgagtttcatcacgcagtacagcaccgggcaggtcagcgtggagattgagtgggagctgcagaaggagaacagcaagcgctggaatcccgagattcagtacacttccaattattataaatcagctaatgtggactttgccgtcaatgcagatggtgtatatagcgaaccccgccccattggcactcgttacctcacccgtaatctgtaa

SEQ ID NO: 2775 - protein, 731 aa, Artificial Sequence
  Synthetic polypeptide
MAADGYLPDWLEDNLSEGIREWWALKPGAPQPKANQQKQDDGRGLVLPGYKYLGPFNGLDKGEPVNEADAAALEHDKAYDQQLKAGDNPYLRYNHADAEFQERLQEDTSFGGNLGRAVFQAKKRVLEPLGLVEEGAKTAPGKKRPVEPDSSSGIGKSGQQPAKKRLNFGPTGDSESVPDPQPLSEPPAGPSGLGSGTMAAGGGAPMADNNEGADGVGNVSGNWHCDSTWLGDRVITTSTRTWALPTYNNHLYKQISNGTSGGSSNDNTYFGYSTPWGYFDFNRFHCHFSPRDWQRLINNNWGFRPKKLNFKLFNIQVKEVTQNEGTKTTANNLTSTVQVFTDSEYQLPYVLGSAHQGCLPPFPADVFMIPQYGYLTLNNGSQAVGRSSFYCLEYFPSQMLRTGNNFTFSYTFEDVPFHSSYAHSQSLDRLMNPLIDQYLYYLSRTQTNGTNATQTLLFAQAGPQNMSAQAKNWLPGPCYRQQRVSTAVSQNNNSNFTWTGATKYHLNGRDSLVNPGVAMATHKDDEERFFPSSGVLMFGKQGAGKDNVEYTNVMLTSEEEIKTTNPVATEQYGVVADNLQQTNSAPIVGAVNSQGALPGMVWQNRDVYLQGPIWAKIPHTDGNFHPSPLMGGFGLKHPPPQILIKNTPVPADPPVNFTDAKLASFITQYSTGQVSVEIEWELQKENSKRWNPEIQYTSNYYKSANVDFAVNADGVYSEPRPIGTRYLTRNL

SEQ ID NO: 2776 - DNA, 4404 bp, Artificial Sequence
  Synthetic polynucleotide
atggctgccgatggttatcttccagattggctcgagggcaacctctctgagggcattcgcgagtggtgggacttgaaacctggagccccgaaacccaaagccaaccagcaaaagcaggacgacggccggggtctggtgcttcctggctacaggtacctcggacccttcaacggactcgacaagggagagccggtcaacgaggcagacgccgcggccctcgagcacgacaaggcctacgacaagcagctcgagcagggggacaacccgtacctcaagtacaaccacgccgacgccgagtttcaggagcgtcttcaagaagatacgtcttttgggggcaacctcgggcgagcagtcttccaggccaagaagcgggttctcgaacctctcggtctggttgaggaaggcgctaagacggctcctggaaagaagagacccatagaatcccccgactcctccacgggcatcggcaagaacggccagccgcccgctaaaaagaagctcaactttgggcagactggcgactcagagtcagtgcccgacccccaacctctcggagaacctcccgccgcgccctcaggtctgggatctggtacaatggctgcaggcggtggcgcaccaatggcagacaataacgaaggcgccgacggagtgggtaatgcctccggaaattggcattgcgattccacatggctgggcgacagagtcatcaccaccagcacccgcacctgggccctgcccacctacaacaaccacctctacaagcagatatcaagtcagagcggggctaccaacgacaaccacttcttcggctacagcaccccctggggctattttgacttcaacagattccactgccacttctcaccacgtgactggcagcgactcatcaacaacaactggggattccggcccagaaagctgcggttcaagttgttcaacatccaggtcaaggaggtcacgacgaacgacggcgttacgaccatcgctaataaccttaccagcacgattcaggtcttctcggactcggagtaccaactgccgtacgtcctcggctctgcgcaccagggctgcctccctccgttccctgcggacgtgttcatgattcctcagtacggatatctgactctaaacaacggcagtcagtctgtgggacgttcctccttctactgcctggagtactttccttctcagatgctgagaacgggcgataactttgaattcagctacacctttgaggaagtgcctttccacagcagctatgcgcacagccagagcctggaccggctgatgaatcccctcatcgaccagtacctgtactacctggcccggacccagagcactacggggtccacaagggagctgcagttccatcaggctgggcccaacaccatggccgagcaatcaaagaactggctgcccggaccctgttatcggcagcagagactgtcaaaaaacatagacagcaacaacaacagtaactttgcctggaccggggccactaaataccatctgaatggtagaaattcattaaccaacccgggcgtagccatggccaccaacaaggacgacgaggaccagttctttcccatcaacggagtgctggtttttggcaaaacgggggctgccaacaagacaacgctggaaaacgtgctaatgaccagcgaggaggagatcaaaaccaccaatcccgtggctacagaagaatacggtgtggtctccagcaacctgcaatcgtctacggccggaccccagacacagactgtcaacagccagggggctctgcccggcatggtctggcagaaccgggacgtgtacctgcagggtcccatctgggccaaaattcctcacacggacggcaactttcacccgtctcccctgatgggcggatttggactcaaacacccgcctcctcaaattctcatcaaaaacaccccggtacctgctaatcctccagaggtgtttactcctgccaagtttgcctcatttatcacgcagtacagcaccggccaggtcagcgtggagatcgagtgggaactgcagaaagaaaacagcaaacgctggaatccagagattcagtacacctcaaattatgccaagtctaataatgtggaatttgctgtcaacaacgaaggggtttatactgagcctcgccccattggcacccgttacctcacccgtaacctgtaaatggctgccgatggttatcttccagattggctcgaggacaacctctctgagggcattcgcgagtggtgggacttgaaacctggagccccgaaacccaaagccaaccagcaaaagcaggacgacggccggggtctggtgcttcctggctacaagtacctcggacccttcaacggactcgacaagggggagcccgtcaacgcggcggacgcagcggccctcgagcacgacaaggcctacgaccagcagctcaaagcgggtgacaatccgtacctgcggtataaccacgccgacgccgagtttcaggagcgtctgcaagaagatacgtcttttgggggcaacctcgggcgagcagtcttccaggccaagaagcgggttctcgaacctctcggtctggttgaggaaggcgctaagacggctcctggaaagaagagaccggtagagccatcaccccagcgttctccagactcctctacgggcatcggcaagaaaggccagcagcccgcgaaaaagagactcaactttgggcagactggcgactcagagtcagtgcccgaccctcaaccaatcggagaaccccccgcaggcccctctggtctgggatctggtacaatggctgcaggcggtggcgctccaatggcagacaataacgaaggcgccgacggagtgggtagttcctcaggaaattggcattgcgattccacatggctgggcgacagagtcatcaccaccagcacccgaacctgggccctccccacctacaacaaccacctctacaagcaaatctccaacgggacttcgggaggaagcaccaacgacaacacctacttcggctacagcaccccctgggggtattttgactttaacagattccactgccacttctcaccacgtgactggcagcgactcatcaacaacaactggggattccggcccaagagactcaacttcaagctcttcaacatccaggtcaaggaggtcacgcagaatgaaggcaccaagaccatcgccaataaccttaccagcacgattcaggtctttacggactcggaataccagctcccgtacgtcctcggctctgcgcaccagggctgcctgcctccgttcccggcggacgtcttcatgattcctcagtacgggtacctgactctgaacaatggcagtcaggccgtgggccgttcctccttctactgcctggagtactttccttctcaaatgctgagaacgggcaacaactttgagttcagctaccagtttgaggacgtgccttttcacagcagctacgcgcacagccaaagcctggaccggctgatgaaccccctcatcgaccagtacctgtactacctgtctcggactcagtccacgggaggtaccgcaggaactcagcagttgctattttctcaggccgggcctaataacatgtcggctcaggccaaaaactggctacccgggccctgctaccggcagcaacgcgtctccacgacactgtcgcaaaataacaacagcaactttgcctggaccggtgccaccaagtatcatctgaatggcagagactctctggtaaatcccggtgtcgctatggcaacccacaaggacgacgaagagcgattttttccgtccagcggagtcttaatgtttgggaaacagggagctggaaaagacaacgtggactatagcagcgttatgctaaccagtgaggaagaaattaaaaccaccaacccagtggccacagaacagtacggcgtggtggccgataacctgcaacagcaaaacgccgctcctattgtaggggccgtcaacagtcaaggagccttacctggcatggtctggcagaaccgggacgtgtacctgcagggtcctatctgggccaagattcctcacacggacggaaactttcatccctcgccgctgatgggaggctttggactgaaacacccgcctcctcagatcctgattaagaatacacctgttcccgcggatcctccaactaccttcagtcaagctaagctggcgtcgttcatcacgcagtacagcaccggacaggtcagcgtggaaattgaatgggagctgcagaaagaaaacagcaaacgctggaacccagagattcaatacacttccaactactacaaatctacaaatgtggactttgctgttaacacagatggcacttattctgagcctcgccccatcggcacccgttacctcacccgtaatctgtaa

SEQ ID NO: 2777 - protein, 738 aa, Artificial Sequence; identical to SEQ ID NO: 2395
  Synthetic polypeptide

SEQ ID NO: 2778 - DNA, 3129 bp, Artificial Sequence
  Synthetic polynucleotide
gaattcgccctttctacggctgcgtcaactggaccaatgagaactttcccttcaacgattgcgtcgacaagatggtgatctggtgggaggagggcaagatgacggccaaggtcgtggagtccgccaaggccattctcggcggcagcaaagtgcgcgtggaccaaaagtgcaagtcgtccgcccagatcgaccccacccccgtgatcgtcacctccaacaccaacatgtgcgccgtgattgacgggaacagcaccaccttcgagcaccagcagccgttgcaggaccggatgttcaagtttgaactcacccgccgtctggagcacgactttggcaaggtgacaaagcaggaagtcagagagttcttccgctgggcgcaggatcacgtgaccgaggtggcgcacgagttctacgtcagaaagggtggagccaacaagagacccgcccccgatgacgcggataaaagcgagcccaagcgggcctgcccctcagtcgcggatccatcgacgtcagacgcggaaggagctccggtggactttgccgacaggtaccaaaacaaatgttctcgtcacgcgggcatgcttcagatgctgtttccctgcaaaacatgcgagagaatgaatcagaatttcaacatttgcttcacgcacgggaccagagactgttcagaatgtttccccggcgtgtcagaatctcaaccggtcgtcagaaaaaagacgtatcggaaactctgtgcgattcatcatctgctgggggcgggcacccgagattgcttgctcggcctgcgatctggtcaacgtggacctagatgactgtgtttctgagcaataaatgacttaaaccaggtatggctgccgatggttatcttccagattggctcgaggacaacctctctgagggcattcgcgagtggtgggacttgaaacctggagccccgaaacccaaagccaaccagcaaaagcaggacgacggccggggtctggtgcttcctggctacaagtacctcggacccttcaacggactcgacaagggggagcccgtcaacgcggcggacgcagcggccctcgagcacgacaaggcctacgaccagcagctcaaagcgggtgacaatccgtacctgcggtataaccacgccgacgccgagtttcaggagcgtctgcaagaagatacgtcttttgggggcaacctcgggcgagcagtcttccaggccaagaagcgggttctcgaacctctcggtctggttgaggaaggcgctaagacggctcctggaaagaagagaccggtagagccatcaccccagcgttctccagactcctctacgggcatcggcaagaaaggccagcagcccgcgaaaaagagactcaactttgggcagactggcgactcagagtcagtgcccgaccctcaaccaatcggagaaccccccgcaggcccctctggtctgggatctggtacaatggctgcaggcggtggcgctccaatggcagacaataacgaaggcgccgacggagtgggtagttcctcaggaaattggcattgcgattccacatggctgggcgacagagtcatcaccaccagcacccgaacctgggccctccccacctacaacaaccacctctacaagcaaatctccaacgggacttcgggaggaagcaccaacgacaacacctacttcggctacagcaccccctgggggtattttgactttaacagattccactgccacttctcaccacgtgactggcagcgactcatcaacaacaactggggattccggcccaagagactcaacttcaagctcttcaacatccaggtcaaggaggtcacgcagaatgaaggcaccaagaccatcgccaataaccttaccagcacgattcaggtctttacggactcggaataccagctcccgtacgtcctcggctctgcgcaccagggctgcctgcctccgttcccggcggacgtcttcatgattcctcagtacgggtacctgactctgaacaatggcagtcaggccgtgggccgttcctccttctactgcctggagtactttccttctcaaatgctgagaacgggcaacaactttgagttcagctaccagtttgaggacgtgccttttcacagcagctacgcgcacagccaaagcctggaccggctgatgaaccccctcatcgaccagtacctgtactacctgtctcggactcagtccacgggaggtaccgcaggaactcagcagttgctattttctcaggccgggcctaataacatgtcggctcaggccaaaaactggctacccgggccctgctaccggcagcaacgcgtctccacgacactgtcgcaaaataacaacagcaactttgcctggaccggtgccaccaagtatcatctgaatggcagagactctctggtaaatcccggtgtcgctatggcaacccacaaggacgacgaagagcgattttttccgtccagcggagtcttaatgtttgggaaacagggagctggaaaagacaacgtggactatagcagcgttatgctaaccagtgaggaagaaattaaaaccaccaacccagtggccacagaacagtacggcgtggtggccgataacctgcaacagcaaaacgccgctcctattgtaggggccgtcaacagtcaaggagccttacctggcatggtctggcagaaccgggacgtgtacctgcagggtcctatctgggccaagattcctcacacggacggaaactttcatccctcgccgctgatgggaggctttggactgaaacacccgcctcctcagatcctgattaagaatacacctgttcccgcggatcctccaactaccttcagtcaagctaagctggcgtcgttcatcacgcagtacagcaccggacaggtcagcgtggaaattgaatgggagctgcagaaagaaaacagcaaacgctggaacccagagattcaatacacttccaactactacaaatctacaaatgtggactttgctgttaacacagatggcacttattctgagcctcgccccatcggcacccgttacctcacccgtaatctgtaattgcttgttaatcaataaaccggttgattcgtttcagttgaactttggtctctgcgaagggcgaattc

SEQ ID NO: 2779 - protein, 738 aa, Artificial Sequence; identical to SEQ ID NO: 2395
  Synthetic polypeptide

SEQ ID NO: 2780 - protein, 733 aa, Artificial Sequence
  Synthetic polypeptide
MAADGYLPDWLEDNLSEGIREWWDLRPGAPKPKANQQKQDDGRGLVLPGYKYLGPFNGLDKGEPVNEADAAALEHDKAYDKQLEQGDNPYLKYNHADAEFQERLQEDTSFGGNLGRAVFQAKKRVLEPLGLVEEGAKTAPGKKRPIESPDSSTGIGKKGQQPAKKRLNFGQTGDSESVPDPQPIGEPPAGPSGLGSGTMAAGGGAPMADNNEGADGVGSSSGNWHCDSTWLGDRVITTSTRTWALPTYNNHLYKQISNGTSGGSTNDNTYFGYSTPWGYFDFNRFHCHFSPRDWQRLINNNWGFRPKRLNFKLFNIQVKEVTQNEGTKTIANNLTSTIQVFTDSEYQLPYVLGSAHQGCLPPFPADVFMIPQYGYLTLNNGSQAVGRSSFYCLEYFPSQMLRTGNNFEFSYQFEDVPFHSSYAHSQSLDRLMNPLIDQYLYYLSRTQSTGGTAGTQQLLFSQAGPNNMSAQAKNWLPGPCYRQQRVSTTVSQNNNSNFAWTGATKYHLNGRDSLVNPGVAMATHKGDEERFFPSSGVLMFGKQGAGKDNVDYSSVMLTSEEEIKTTNPVATEQYGVVADNLQQQNAAPIVGAVNSQGALPGMVWQNRDVYLQGPIWAKIPHTDGNFHPSPLMGGFGLKHPPPQILIKNTPVPADPPTTFSQAKLASFITQYSTGQVSVEIEWELQKENSKRWNPEIQYTSNYYKSTNVDFAVNTEGTYSEPRPIGTRYLTRNL

SEQ ID NO: 2781 - DNA, 2501 bp, Artificial Sequence
  Synthetic polynucleotide
gaattcgcccttggctgcgtcaactggaccaatgagaactttcccttcaacgattgcgtcgacaagatggtgatctggtgggaggagggcaagatgacggccaaggtcgtggagtccgccaaggccattcatcatctgctggggcgggctcccgagattgcttgctcggcctgcgatctggtcaacgtggacctggatgactgtgtttctgagcaataaatgacttaaaccaggtatggctgccgatggttatcttccagattggctcgaggacaacctctctgagggcattcgcgagtggtgggacttgagacctggagccccgaaacccaaagccaaccagcaaaagcaggacgacggccggggtctggtgcttcctggctacaagtacctcggacccttcaacggactcgacaagggagagccggtcaacgaggcagacgccgcggccctcgagcacgacaaggcctacgacaagcagctcgagcagggggacaacccgtacctcaagtacaaccacgccgacgccgagtttcaggagcgtcttcaagaagatacgtcttttgggggcaacctcgggcgagcagtcttccaggccaagaagcgggttctcgaacctctcggtctggttgaggaaggcgctaagacggctcctggaaagaagagacccatagaatcccccgactcctccacgggcatcggcaagaaaggccagcagcccgctaaaaagagactcaactttgggcagactggcgactcagagtcagtgcccgaccctcaaccaatcggagaaccccccgcaggcccctctggtctgggatctggcacaatggctgcaggcggtggcgctccaatggcagacaataacgaaggcgccgacggagtgggtagttcctcaggaaattggcattgcgattccacatggctgggcgacagagtcatcaccaccagcacccgaacctgggccctccccacctacaacaaccacctctacaagcaaatctccaacgggacatcgggaggaagcaccaacgacaacacctacttcggctacagcaccccctgggggtattttgactttaacagattccactgccacttctcaccacgtgactggcagcgactcatcaacaacaactggggattccggcccaagagactcaacttcaagctcttcaacatccaggtcaaggaggtcacgcagaatgaaggcaccaagaccatcgccaataaccttaccagcacgattcaggtctttacggactcggaataccagctcccgtacgtcctcggctctgcgcaccagggctgcctgcctccgttcccggcggacgtcttcatgattcctcagtacgggtacctgactctgaacaacggcagtcaggccgtgggccgttcctccttctactgcctggagtactttccttctcaaatgctgagaacgggcaacaactttgagttcagctaccagtttgaggacgtgccttttcacagcagctatgcgcacagccaaagcctggaccggctgatgaaccccctcatcgaccagtacctgtactacctgtctcggactcagtccacgggaggtaccgcaggaactcagcagttgctattttctcaggccgggcctaataacatgtcggctcaggccaaaaactggctacccgggccctgctaccggcagcaacgcgtctccacgacagtgtcgcaaaataacaacagcaactttgcttggaccggtgccaccaagtatcatctgaatggcagagactctctggtaaatcccggtgtcgctatggcaacgcacaagggcgacgaagagcgattttttccatccagcggagtcttgatgtttgggaaacagggagctggaaaagacaacgtagactatagcagcgttatgctaaccagtgaggaagaaatcaaaaccaccaacccagtggccacagaacagtacggcgtggtggccgataacctgcaacagcaaaacgccgctcctattgtaggggccgtcaacagtcaaggagccttacctggcatggtctggcagaaccgggacgtgtacctgcagggtcctatctgggccaagattcctcacacggacggcaactttcatccttcgccgctgatgggaggctttggactgaaacacccgcctcctcagatcctgattaagaatacacctgttcccgcggatcctccaactaccttcagtcaagccaagctggcgtcgttcatcacgcagtacagcaccggacaggtcagcgtggaaattgaatgggagctgcagaaagagaacagcaagcgctggaacccagagattcagtatacttccaactactacaaatctacaaatgtggactttgctgtcaatactgagggtacttattcagagcctcgccccattggcacccgttacctcacccgtaacctgtaattgcctgttaatcaataaaccggttgattcgtttcagttgaactttggtctcaagggcgaattc

SEQ ID NO: 2782 - DNA, 2187 bp, Artificial Sequence
  Synthetic polynucleotide
atggctgccgatggttatcttccagattggctcgaggacaacctctctgagggcattcgcgagtggtgggacttgaaacctggagccccgaaacccaaagccaaccagcaaaagcaggacgacggccggggtctggtgcttcctggctacaagtacctcggacccttcaacggactcgacaagggagagccggtcaacgaggcagacgccgcggccctcgagcacgacaaggcctacgacaagcagctcgagcagggggacaacccgtacctcaagtacaaccacgccgacgccgagtttcaggagcgtcttcaagaagatacgtcttttgggggcaacctcgggcgagcagtcttccaggccaagaagcgggttctcgaacctctcggtctggttgaggaaggcgctaagacggctcctggaaagaagagacccatagaatcccccgactcctccacgggcatcggcaagaaaggccagcagcccgctaaaaagaagctcaactttgggcagactggcgactcagagtcagtgcccgacccccaacctctcggagaacctcccgccgcgccctcaggtctgggatctggtacaatggctgcaggcggtggcgcaccaatggcagacaataacgaaggcgccgacggagtgggtaatgcctccggaaattggcattgcgattccacatggctgggcgacagagtcatcaccaccagcacccgcacctgggccctgcccacctacaacaaccacctctacaagcagatatcaagtcagagcggggctaccaacgacaaccacttcttcggctacagcaccccctggggctattttgacttcaacagattccactgccacttctcaccacgtgactggcagcgactcatcaacaacaactggggattccggcccagaaagctgcggttcaagttgttcaacatccaggtcaaggaggtcacgacgaacgacggcgttacgaccatcgctaataaccttaccagcacgattcaggtcttctcggactcggagtaccaactgccgtacgtcctcggctctgcgcaccagggctgcctccctccgttccctgcggacgtgttcatgattcctcagtacggatatctgactctaaacaacggcagtcagtctgtgggacgttcctccttctactgcctggagtactttccttctcagatgctgagaacgggcaataactttgaattcagctacacctttgaggaagtgcctttccacagcagctatgcgcacagccagagcctggaccggctgatgaatcccctcatcgaccagtacctgtactacctggcccggacccagagcactacggggtccacaagggagctgcagttccatcaggctgggcccaacaccatggccgagcaatcaaagaactggctgcccggaccctgttatcggcagcagagactgtcaaaaaacatagacagcaacaacaacagtaactttgcctggaccggggccactaaataccatctgaatggtagaaattcattaaccaacccgggcgtagccatggccaccaacaaggacgacgaggaccagttctttcccatcaacggagtgctggtttttggcgaaacgggggctgccaacaagacaacgctggaaaacgtgctaatgaccagcgaggaggagatcaaaaccaccaatcccgtggctacagaagaatacggtgtggtctccagcaacctgcaatcgtctacggccggaccccagacacagactgtcaacagccagggggctctgcccggcatggtctggcagaaccgggacgtgtacctgcagggtcccatctgggccaaaattcctcacacggacggcaactttcacccgtctcccctgatgggcggatttggactcaaacacccgcctcctcaaattctcatcaaaaacaccccggtacctgctaatcctccagaggtgtttactcctgccaagtttgcctcatttatcacgcagtacagcaccggccaggtcagcgtggagatcgagtgggaactgcagaaagaaaacagcaaacgctggaatccagagattcagtacacctcaaattatgccaagtctaataatgtggaatttgctgtcaacaacgaaggggtttatactgagcctcgccccattggcacccgttacctcacccgtaacctgtaa

SEQ ID NO: 2783 - protein, 728 aa, Artificial Sequence; identical to SEQ ID NO: 2451
  Synthetic polypeptide

SEQ ID NO: 2784 - protein, 728 aa, Artificial Sequence; identical to SEQ ID NO: 2543
  Synthetic polypeptide

SEQ ID NO: 2785 - protein, 728 aa, Artificial Sequence; identical to SEQ ID NO: 2543
  Synthetic polypeptide

SEQ ID NO: 2786 - protein, 733 aa, Artificial Sequence
  Synthetic polypeptide
MAADGHLPDWLEDNLSEGIREWWDLKPGAPKPKANQQKQDDGRGLVLPGYKYLGPFNGLDKGEPVNAADAAALEHDKAYDQQLKAGDNPYLRYNHADAEFQERLQEDTSFGGNLGRAVFQAKKRVLEPLGLVEEGAKTAPGKKRPIESPDSSTGIGKKGQQPAKKKLNFGQTGDSESVPDPQPIGEPPAGPSGLGSGTMAAGGGAPMADNNEGADGVGSSSGNWHCDSTWLGDRVITTSTRTWALPTYNNHLYKQISNGTSGGSTNDNTYFGYSTPWGYFDFNRFHCHFSPRDWQRLINNSWGFRPKRLNFKLFNIQVKEVTQNEGTKTIANNLTSTIQVFTDSEYQLPYVLGSAHQGCLPPFPADVFMIPQYGYLTLNNGSQAVGRSSFYCLEYFPSQMLRTGNNFEFSYQFEDVPFHSSYAHSQSLDRLMNPLIDQYLYYLSRTQSTGGTAGTQQLLFSQAGPNNMSAQAKNWLPGPCYRQQRVSTTLSQNNNSNFAWTGATKYHLNGRDSLVNPGVAMATHKDDEERFFPSSGVLMFGKQGAGKDNVDYSSVMLTSEEEIKTTNPVATEQYGVVADNLQQQNAAPIVGAVNSQGALPGMVWQNRDVYLQGPIWAKIPHTDGNFHPSPLMGGFGLKHPPPQILIKNTPVPADPPTTFSQAKLASFITQYSTGQVSVEIEWELQKENSKRWNPEIQYTSNYYKSTNVDFAVNTEGTYSEPRPIGTRYLTRNL

SEQ ID NO: 2787 - DNA, 3113 bp, Artificial Sequence
  Synthetic polynucleotide
gaattcgccctttctacggctgcgtcaactggaccaatgagaactttcccttcaacgattgcgtcgacaagatggtgatctggtgggaggagggcaagatgacggccaaggtcgtggagtccgccaaggccattctcggcggcagcaaggtgcgcgtggaccaaaagtgcaagtcgtccgcccagatcgatcccacccccgtgatcgtcacttccaacaccaacatgtgcgccgtgattgacgggaacagcaccaccttcgagcaccagcagccgttacaagaccggatgttcaaatttgaactcacccgccgtctggagcatgactttggcaaggtgacaaagcaggaagtcaaagagttcttccgctgggcgcaggatcacgtgaccgaggtggcgcatgagttctacgtcagaaagggtggagccaacaagagacccgcccccgatgacgcggataaaagcgagcccaagcgggcctgcccctcagtcgcggatccatcgacgtcagacgcggaaggagctccggtggactttgccgacaggtaccaaaacaaatgttctcgtcacgcgggcatgcttcagatgctgcttccctgcaagacatgcgagagaatgaatcagaatttcagcatttgcttcacgcacgggaccagagactgttcagaatgtttccccggcgtgtcagaatctcaaccggtcgtcagaaagaggacgtatcggaaactctgtgccattcatcatctgctggggcgggctcccgagattgcttgctcggcctgcgatctggtcaacgtggacctggatgactgtgtttctgagcaataaatgacttaaaccaggtatggctgccgatggtcatcttccagattggctcgaggacaacctctctgagggcattcgcgagtggtgggacttgaaacctggagccccgaaacccaaagccaaccagcaaaagcaggacgacggccggggtctggtgcttcctggctacaagtacctcggacccttcaacggactcgacaagggggagcccgtcaacgcggcggacgcagcggccctcgagcacgacaaggcctacgaccagcagctcaaagcgggtgacaatccgtacctgcggtataaccacgccgacgccgagtttcaggagcgtcttcaagaagatacgtcttttgggggcaacctcgggcgagcagtcttccaggccaagaagcgggttctcgaacctctcggtctggttgaggaaggcgctaagacggctcctggaaagaagagacccatagaatcccccgactcctccacgggcatcggcaagaaaggccagcagcccgctaaaaagaagctcaactttgggcagactggcgactcagagtcagtgcccgaccctcaaccaatcggagaaccccccgcaggcccctctggtctgggatctggtacaatggctgcaggcggtggcgctccaatggcagacaataacgaaggcgccgacggagtgggtagttcctcaggaaattggcattgcgattccacatagctgggcgacagagtcatcaccaccagcacccgaacctgggccctccccacctacaacaaccacctctacaagcaaatctccaacgggacatcgggaggaagcaccaacgacaacacctacttcggctacagcaccccctgggggtattttgactttaacagattccactgccacttctcaccacgtgactggcagcgactcatcaacaacagctggggattccggcccaagagactcaacttcaagctcttcaacatccaggtcaaggaggtcacgcagaatgaaggcaccaagaccatcgccaataaccttaccagcacgattcaggtctttacggactcggaataccagctcccgtacgtcctcggctctgcgcaccagggctgcctgcctccgttcccggcggacgtcttcatgattcctcagtacgggtacctgactctgaacaacggcagtcaggccgtgggccgttcctccttctactgcctggagtactttccttctcaaatgctgagaacgggcaacaactttgagttcagctaccagtttgaggacgtgccttttcacagcagctacgcgcacagccaaagcctggaccggctgatgaaccccctcatcgaccagtacctgtactacctgtctcggactcagtccacgggaggtaccgcaggaactcagcagttgctattttctcaggccgggcctaataacatgtcggctcaggccaaaaactggctacccgggccctgctaccggcagcaacgcgtctccacgacactgtcgcaaaataacaacagcaactttgcttggaccggtgccaccaagtatcatctgaatggcagagactctctggtaaatcccggtgtcgctatggcaacgcacaaggacgacgaagagcgattttttccatccagcggagtcttgatgtttgggaaacagggagctggaaaagacaacgtggactatagcagcgttatgctaaccagtgaggaagaaatcaaaaccaccaacccagtggccacagaacagtacggcgtggtggccgataacctgcaacagcaaaacgccgctcctattgtaggggccgtcaacagtcaaggagccttacctggcatggtctggcagaaccgggacgtgtacctgcagggtcctatctgggccaagattcctcacacggacggcaactttcatccttcgccgctgatgggaggctttggactgaaacacccgcctcctcagatcctgattaagaatacacctgttcccgcggatcctccaactaccttcagtcaagccaagctggcgtcgttcatcacgcagtacagcaccggacaggtcagcgtggaaattgaatgggagctgcagaaagagaacagcaagcgctggaacccagagattcagtatacttccaactactacaaatctacaaatgtggactttgctgtcaatactgagggtacttattcagagcctcgccccattggcacccgttacctcacccgtaacctgtaattgcctgttaatcaataaaccggttaattcgtttcagttgaactttggtctctgcgaagggcgaattc

SEQ ID NO: 2788 - protein, 731 aa, Artificial Sequence
  Synthetic polypeptide
MAADGYLPDWLEDNLSEGIREWWDLKPGAPKPKANQQKQDDGRGLVLPGYKYLGPFNGLDKGEPVNEADAAALEHDKAYDKQLEQGDNPYLKYNHADAEFQERLQEDTSFGGNLGRAVFRAKKRVLEPLGLVEEGAKTAPGKKRPIESPDSSTGIGKKGQQPAKKKLNFGQTGDSESVPDPQPLGEPPAAPSGLGSGTMAAGGGAPMADNNEGADGVGNASGNWHCDSTWLGDRVITTSTRTWALPTYNNHLYKQISSQSGATNDNHFFGYSTPWGYFDFNRFHCHFSPRDWQRLINNNRGFRPRKLRFKLFNIQVKEVTTNDGVTTIANNLTSTIQVFSDSEYQLPYVLGSAHQGCLPPFPADVFMIPQYGYLTLNNGSQSVGRSSFYCLEYFPSQMLRTGNNFEFSYQFEDVPFHSSYAHSQSLDRLMNPLIDQYLYYLSRTQSTGGTAGTQQLLFSQAGPNNMSAQAKNWLPGPCYRQQRVSTTLSQNNNSNFAWTGATKYHLNGRDSLVNPGVAMATHKDDEERFFPSSGVLMFGKQGAGKDNVDYSSVMLTSEEEIKTTNPVATEQYGVVADNLQQQNAAPIVGAVNSQGALPGMAWQNRDVYLQGPIWAKIPHTDGNFHPSPLMGGFGLKHPPPQILIKNTPVPADPPTTFSQAKLASFITQYSTGQVSVEIEWELQKENSKRWNPEIQYTSNYYKSTNVDFAVNTEGTYSEPRPIGTRYLTRNL

SEQ ID NO: 2789 - DNA, 3106 bp, Artificial Sequence
  Synthetic polynucleotide
gaattcgcccttctacggctgcgtcaactggaccaatgagaactttcccttcaacgattgcgtcgacaagatggtgatctggtgggaggagggcaagatgacggccaaggtcgtggagtccgccaaggccattctcggcggcagcaaggtgcgcgtggaccaaaagtgcaagtcgtccgcccagatcgaccccacccccgtgatcgtcacctccaacaccaacatgtgcgccgtgattgacgggaacagcaccaccttcgagcaccagcagccgttgcaggaccggatgttcaaatttgaactcacccgccgtctggagcatgactttggcaaggcgacaaagcaggaagtcaaagagttcttccgctgggcgcaggatcacgtgaccgaggtggcgcatgagttctacgtcagaaagggtggagccaacaagagacccgcccccgatgacgcggataaaagcgagcccaagcgggcccgcccctcagtcgcggatccatcgacgtcagacgcggaaggagctccggtggactttgccgacaggtaccaaaacaaatgttctcgtcacgcgggcatgcttcagatgctgtttccctgcaaaacatgcgagagaatgaatcagaatttcaacatttgcttcacgcacgggaccagagactgttcagaatgtttccccggcgtgtcagaatctcaaccggtcgtcagaaagaggacgtatcggaaactctgtgccattcatcatctgctggggcgggctcccgagattgcttgctcggcctgcgatctggtcaacgtggacctggatgactgtgtttctgagcaataaatgacttaaaccaggtatggctgccgatggttatcttccagattggctcgaggacaacctctctgagggcattcgcgagtggtgggacttgaaacctggagccccgaaacccaaagccaaccagcaaaagcaggacgacggccggggtctggtgcttcctggctacaagtacctcggacccttcaacggactcgacaagggagagccggtcaacgaggcagacgccgcggccctcgagcacgacaaggcctacgacaagcagctcgagcagggggacaacccgtacctcaagtacaaccacgccgacgccgagtttcaggagcgtcttcaagaagatacgtcttttgggggcaacctcgggcgagcagtcttccgggccaagaagcgggttctcgaacctctcggtctggttgaggaaggcgctaagacggctcctggaaagaagagacccatagaatcccccgactcctccacgggcatcggcaagaaaggccagcagcccgctaaaaagaagctcaactttgggcagactggcgactcagagtcagtgcccgacccccaacctctcggagaacctcccgccgcgccctcaggtctgggatctggtacaatggctgcaggcggtggcgcaccaatggcagacaataacgaaggcgccgacggagtgggtaatgcctccggaaattggcattgcgattccacatggctgggcgacagagtcatcaccaccagcacccgcacctgggccctgcccacctacaacaaccacctctacaagcagatatcaagtcagagcggggctaccaacgacaaccacttcttcggctacagcaccccctggggctattttgacttcaacagattccactgccacttctcaccacgtgactggcagcgactcatcaacaacaaccggggattccggcccagaaagctgcggttcaagttgttcaacatccaggtcaaggaggtcacgacgaacgacggcgttacgaccatcgctaataaccttaccagcacgattcaggtcttctcggactcggagtaccaactgccgtacgtcctcggctctgcgcaccagggctgcctccctccgttccctgcggacgtgttcatgattcctcagtacggatatctgactctaaacaacggcagtcagtctgtgggacgttcctccttctactgcctggagtactttccttctcagatgctgagaacgggcaataactttgaattcagctaccagtttgaggacgtgccctttcacagcagctacgcgcacagccaaagcctggaccggctgatgaaccccctcatcgaccagtacctgtactacctgtctcggactcagtccacgggaggtaccgcaggaactcagcagttgctattttctcaggccgggcctaataacatgtcggctcaggccaaaaactggctacccgggccctgctaccggcagcaacgcgtctccacgacactgtcgcaaaataacaacagcaactttgcttggaccggtgccaccaagtatcatctgaatggcagagactctctggtaaatcccggtgtcgctatggcaacgcacaaggacgacgaagagcgattttttccatccagcggagtcttgatgtttgggaaacagggagctggaaaagacaacgtggactatagcagcgttatgctaaccagtgaggaagaaatcaaaaccaccaacccagtggccacagaacagtacggcgtggtggccgataacctgcaacagcaaaacgccgctcctattgtaggggccgtcaacagtcaaggagccttacctggcatggcctggcagaaccgggacgtgtacctgcagggtcctatctgggccaagattcctcacacggacggcaactttcatccttcgccgctgatgggaggctttggactgaaacacccgcctcctcagatcctgattaagaatacacctgttcccgcggatcctccaactaccttcagtcaagccaagctggcgtcgttcatcacgcagtacagcaccggacaggtcagcgtggaaattgaatgggagctgcagaaagagaacagcaagcgctggaacccagagattcagtatacttccaactactacaaatctacaaatgtggactttgctgtcaatactgagggtacttattcagagcctcgccccattggcacccgttacctcacccgtaacctgtaattgcctgttaatcaataaaccggttaattcgtttcagttgaactttggtctctgcgaagggcgaattc

SEQ ID NO: 2790 - protein, 738 aa, Artificial Sequence
  Synthetic polypeptide
MAADGYLPDWLEDNLSEGIREWWDLKPGAPKPKANQQKQDDGRGLVLPGYKYLGPFNGLDKGEPVNEADAAALEHDKAYDKQLEQGDNPYLKYNHADAEFQERLQEDTSFGGNLGRAVFQAKKRVLEPLGLVEEGAKTAPGKKRPVEPSPQRSPDSSTGIGKTGQQPAKKRLNFGQTGDSESVPDPQPIGEPPAGPSGLGSGTMAAGGGAPMADNNEGADGVGSSSGNWHCDSTWLGDRVITTSTRTWALPTYNNHLYKQISNGTSGGSTNDNTYFGYSTPWGYFDFNRFHCHFSPRDWQRLINNNWGFRPKRLNFKLFNIQVKEVTQNEGTKTIANNLTSTIQVFTDSEYQLPYVLGSAHQGCLPPFPADVFMIPQYGYLTLNNGSQAVGRSSFYCLEYFPSQMLRTGNNFEFSYQFEDVPFHSSYAHSQSLDRLMNPLIDQYLYYLSRTQSTGGTAGTQQLLFSQAGPNNMSAQAKNWLPGPCYRQQRVSTTLSQNNNSNFAWTGATKYHLNGRDSLVNPGVAMATHKDDEERFFPSSGVLMFGKQGAGKDNVDYSSVMLTSEEEIKTTNPVATEQYGVVADNLQQQNAAPIVGAVNSQGALPGMVWQNRDVYLQGPIWAKIPHTDGNFHPSPLMGGFGLKHPPPQILIKNTPVPADPPTTFSQAKLASFITQYSTGQVSVEIEWELQKENSKRWNPEIQYTSNYYKSTNVDFAVNTEGTYSEPRPIGTRYLTRNL

SEQ ID NO: 2791 - DNA, 3197 bp, Artificial Sequence
  Synthetic polynucleotide
gaattcgccctttctacggctgcgtcaactggaccaatgagaactttcccttcaacgattgcgtcgacaagatggtgatctggtgggaggagggcaagatgacggccaaggtcgtggagtccgccaaggccattctcggcggcagcaaggtgcgcgtggaccaaaagtgcaagtcgtccgcccagatcgaccccacccccgtgatcgtcacctccaacaccaacatgtgcgccgtgattgacgggaacagcaccaccttcgagcaccagcagccgttacaagaccggatgttcaaatttgaactcacccgccgtctggagcacgactttggcaaggtgacaaagcaggaagtcaaagagttcttccgctgggcgcaggatcacgtgaccgaggtggcgcatgagttctacgtcagaaagggtggagccaacaagagacccgcccccgatgacgcggataaaagcgagcccaagcgggcctgcccctcagtcgcggatccatcgacgtcagacgcggaaggagctccggtggactttgccgacaggtaccaaaacaaatgttctcgtcacgcgggcatgcttcagatgctgtttccctgcaagacatgcgagagaatgaatcagaatttcaacatttgcttcacgcacgggaccagagactgttcagaatgtttccccggcgtgtcagaatctcaaccggtcgtcagaaagaggacgtatcggaaactctgtgccattcatcatctgctggggcgggctcccgagattgcttgctcggcctgcgatctggtcaacgtggacctggatgactgtgtttctgagcaataaatgacttaaaccaggtatggctgccgatggttatcttccagattggctcgaggacaacctctctgagggcattcgcgagtggtgggacttgaaacctggagccccgaaacccaaagccaaccagcaaaagcaggacgacggccggggtctggtgcttcctggctacaagtacctcggacccttcaacggactcgacaagggagagccggtcaacgaggcagacgccgcggccctcgagcacgacaaggcctacgacaagcagctcgagcagggggacaacccgtacctcaagtacaaccacgccgacgccgagtttcaggagcgtcttcaagaagatacgtcttttgggggcaacctcgggcgagcagtcttccaggccaagaagcgggttctcgaacctctcggtctggttgaggaaggcgctaagacggctcctggaaagaagagaccggtagagccatcaccccagcgttctccagactcctctacgggcatcggcaagacaggccagcagcccgcgaaaaagagactcaactttgggcagactggcgactcagagtcagtgcccgaccctcaaccaatcggagaaccccccgcaggcccctctggtctgggatctggtacaatggctgcaggcggtggcgctccaatggcagacaataacgaaggcgccgacggagtgggtagttcctcaggaaattggcattgcgattccacatggctgggcgacagagtcatcaccaccagcacccgaacctgggccctccccacctacaacaaccacctctacaagcaaatctccaacgggacatcgggaggaagcaccaacgacaacacctacttcggctacagcaccccctgggggtattttgactttaacagattccactgccacttctcaccacgtgactggcagcgactcatcaacaacaactggggattccggcccaagagactcaacttcaagctcttcaacatccaggtcaaggaggtcacgcagaatgaaggcaccaagaccatcgccaataaccttaccagcacgattcaggtctttacggactcggaataccagctcccgtacgtcctcggctctgcgcaccagggctgcctgcctccgttcccggcggacgtcttcatgattcctcagtacgggtacctgactctgaacaacggcagtcaggccgtgggccgttcctccttctactgcctggagtactttccttctcaaatgctgagaacgggcaacaactttgagttcagctaccagtttgaggacgtgccttttcacagcagctacgcgcacagccaaagcctggaccggctgatgaaccccctcatcgaccagtacctgtactacctgtctcggactcagtccacgggaggtaccgcaggaactcagcagttgctattttctcaggccgggcctaataacatgtcggctcaggccaaaaactggctacccgggccctgctaccggcagcaacgcgtctccacgacactgtcgcaaaataacaacagcaactttgcttggaccggtgccaccaagtatcatctgaatggcagagactctctggtaaatcccggtgtcgctatggcaacgcacaaggacgacgaagagcgattttttccatccagcggagtcttgatgtttgggaaacagggagctggaaaagacaacgtggactatagcagcgttatgctaaccagtgaggaagaaatcaaaaccaccaacccagtggccacagaacagtacggcgtggtggccgataacctgcaacagcaaaacgccgctcctattgtaggggccgtcaacagtcaaggagccttacctggcatggtctggcagaaccgggacgtgtacctgcagggtcctatctgggccaagattcctcacacggacggcaactttcatccttcgccgctgatgggaggctttggactgaaacacccgcctcctcagatcctgattaagaatacacctgttcccgcggatcctccaactaccttcagtcaagccaagctggcgtcgttcatcacgcagtacagcaccggacaggtcagcgtggaaattgaatgggagctgcagaaagagaacagcaagcgctggaacccagagattcagtatacttccaactactacaaatctacaaatgtggactttgctgtcaatactgagggtacttattcagagcctcgccccattggcacccgttacctcacccgtaacctgtaattgcctgttaatcaataaaccggttaattcgtttcagttgaactttggtctctgcgaagggcgaattcgtttaaacctgcaggactagtccctttagtgagggttaattctgagcttggcgtaatcatgggtcatag

SEQ ID NO: 2792 - protein, 735 aa, Artificial Sequence
  Synthetic polypeptide
MAADGYLPDWLEDNLSEGIREWWDLKPGAPKPKANQQKQDDGRGLVLPGYKYLGPFNGLDKGEPVNEADAAALEHDKAYDKQLEQGDNPYLKYNHADAEFQERLQEDTSFGGNLGRAVFQAKKRVLEPLGLVEEGAKTAPGKKRPVEPSPQRSPDSSTGIGKTGQQPAKKRLNFGQTGDSESVPDPQPIGEPPAGPSGLGSGTMAAGGGAPMADNNEGADGVGSSSGNWHCDSTWLGDRVITTSTRTWALPTYNNHLYKQISNGTSGGSTNDNTYFGYSTPWGYFDFNRFHCHFSPRDWQRLINNNWGFRPRKLRFKLFNIQVKEVTTDDGVTTIANNLTSTIQVFSDSEYQLPYVLGSAHQGCLPPFPADVFMIPQYGYLTLNNGSQSVGRSSFYCLEYFPSQMLRTGNNFEFSYTFEEVPFHSSYAHSQSLDRLMNPLIDQYLYYLARTQSTTGSTRELQFHQAGPNTMAEQSKNWLPGPCYRQQRLSKNIDSNNNSNFAWTGATKYHLNGRNSLTNPGVAMATNKDDEDQFFPINGVLVFGKTGAANKTTLENVLMTSEEEIKTTNPVATEEYGVVSSNLQSSTAGPQTQTVNSQGALPGMVWQNRDVYLQGPIWAKIPHTDGNFHPSPLMDGFGLKHPPPQILIKNTPVPANPPEVFTPAKFASFITQYSTGQVSVEIEWELQKENSKRWNPEIQYTSNYAKSNNVEFAVNNEGVYTEPRPIGTRYLTRNL

SEQ ID NO: 2793 - DNA, 3276 bp, Artificial Sequence
  Synthetic polynucleotide
gaattcgcccttcgcagagaccaaagttcaactgaaacgaattaaccggtttattgattaacaggcaattacaggttacgggtgaggtaacgggtgccaatggggcgaggctcagtataaaccccttcgttgttgacagcaaattccacattattagacttggcataatttgaggtgtactgaatctctggattccagcgtttgctgttttctttctgcagttcccactcgatctccacgctgacctggccggtgctgtactgcgtgataaatgaggcaaacttggcaggagtaaacacctctggaggattagcaggtaccggggtgtttttgatgagaatttgaggaggcgggtgtttgagtccaaatccgtccatcaggggagacgggtgaaagttgccgtccgtgtgaggaattttggcccagatgggaccctgcaggtacacgtcccggttctgccagaccatgccgggcagagccccctggctgttgacagtctgtgtctggggtccggccgtagacgattgcaggttgctggagaccacaccgtattcttctgtagccacgggattggtggttttgatctcctcctcgctggtcattagcacgttttccagcgttgtcttgttggcagcccccgttttgccaaaaaccagcactccgttgatgggaaagaactggtcctcgtcgtccttgttggtggccatggctacgcccgggttggttaatgaatttctaccattcagatggtatttagtggccccggtccaggcaaagttactgttgttgttgctgtctatgttttttgacagtctctgctgccgataacagggtccgggcagccagttctttgattgctcggccatggtgttgggcccagcctgatggaactgcagctcccttgtggaccccgtagtgctctgggtccgggccaggtagtacaggtactggtcgatgaggggattcatcagccggtccaggctctggctatgcgcatagctgctgtggaaaggcacttcctcaaaggtgtagctgaattcaaagttattgcccgttctcagcatctgagaaggaaagtactccaggcagtagaaggaggaacgtcccacagactgactgccgttgtttagagtcagatatccgtactgaggaatcatgaacacgtccgcagggaacggagggaggcagccctggtgcgcagagccgaggacgtacggcagttggtactccgagtccgagaagacctgaatcgtgctggtaaggttattagcgatggtcgtaacgccgtcgtccgtcgtgacctccttgacctggatgttgaacaacttgaaccgcagctttctgggccggaatccccagttgttgttgatgagtcgctgccagtcacgtggtgagaagtggcagtggaatctgttaaagtcaaaatacccccagggggtgctgtagccgaagtaggtgttgtcgttggtgcttcctcccgatgtcccgttggagatttgcttgtagaggtggttgttgtaggtggggagggcccaggttcgggtgctggtggtgatgactctgtcgcccagccatgtggaatcgcaatgccaatttcctgaggaactacccactccgtcggcgccttcgttattgtctgccattggagcgccaccgcctgcagccattgtaccagatcccagaccagaggggcctgcggggggttctccgattggttgagggtcgggcactgactctgagtcgccagtctgcccaaagttgagtctctttttcgcgggctgctggcctgtcttgccgatgcccgtagaggagtctggagaacgctggggtgatggctctaccggtctcttctttccaggagccgtcttagcgccttcctcaaccagaccgagaggttcgagaacccgcttcttggcctggaagactgctcgcccgaggttgcccccaaaagacgtatcttcttgaagacgctcctgaaactcggcgtcggcgtggttgtacttgaggtacgggttgtccccctgctcgagctgcttgtcgtaggccttgtcgtgctcgagggccgcggcgtctgcctcgttgaccggctctcccttgtcgagtccgttgaagggtccgaggtacttgtagccaggaagcaccagaccccggccgtcgtcctgcttttgctggttggctttgggtttcggggctccaggtttcaagtcccaccactcgcgaatgccctcagagaggttgtcctcgagccaatctggaagataaccatcggcagccatacctggtttaagtcatttattgctcagaaacacagtcatccaggtccacgttgaccagatcgcaggccgagcaagcaatctcgggagcccgccccagcagatgatgaatggcacagagtttccgatacgtcctctttctgacgaccggttgagattctgacacgccggggaaacattctgaacagtctctggtcccgtgcgtgaagcaaatgttgaaattctgattcattctctcgcatgtcttgcagggaaacagcatctgaagcatgcccgcgtgacgagaacacttgttttggtacctgtcggcaaagtccaccggagctccttccgcgtctgacgtcgatggatgcaaaatgtcgcaaaagcactcacgtgacagctaatacaggaccactcccctatgacgtgatttacgtcagcgctatgcccgcgtgacgagaacatttgttttggtacctgtcggcaaagtccaccggagctccttccgcgtctgacgtcgatggatccgcgactgaggggcaggcccgcttgggctcgcttttatccgcgtcatcgggggcgggtctcttgttggctccaccctttctgacgtagaactcatgcgccacctcggtcacgtgatcctgcgcccagcggaagaactctttgacttcctgctttgtcaccttgccaaagtcatgctccagacggcgggtgagttcaaatttgaacatccggtcctgcaacggctgctggtgctcgaaggtggtgctgttcccgtcaatcacggcgcacatgttggtgttggaagtgacgatcacgggggtgggatcgatctgggcggaagacttgcacttttggtccacgcgcaccttgctgccgccgagaatggccttggcggactccacgaccttggccgtcatcttgccctcctcccaccagatcaccatcttgtcgacgcaatcgttgaagggaaagttctcattggtccagttgacgcagccgtagaaagggcgaattc

SEQ ID NO: 2794 - protein, 738 aa, Artificial Sequence; identical to SEQ ID NO: 2459
  Synthetic polypeptide

SEQ ID NO: 2795 - protein, 738 aa, Artificial Sequence
  Synthetic polypeptide
MAADGYLPDWLEDNLSEGIREWWDLKPGAPKPKANQQKQDDGRGLVLPGYKYLGPFNGLDKGEPVNAADAAALEHDKAYDQQLKAGDNPYLRYNHADAEFQERLQEDTSFGGNLGRAVFQAKKRVLEPLGLVEEGAKTAPGKKRPVEPSPQRSPDSSTGIGKKGHQPARKRLNFGQTGDSESVPDPQPIGEPPAGPSGLGSGTMAAGGGAPMADNNEGADGVGSSSGNWHCDSTWLGDRVITTSTRTWALPTYNNHLYKQISNGTSGGSTNDNTYFGYSTPWGYFDFNRFHCHFSPRDWQRLINNNWGFRPKRLNFKLFNIQVKEVTQNEGTKTIANNLTSTIQVFTDSEYQLPYVPGSAHQGCLPPFPADVFMIPQYGYLTLNNGSQAVGRSSFYCLEYFPSQMLRTGNNFEFSYTFEDVPFHSSYAHSQSLDRLMNPLIDQYLYYLSRTQSTGGTQGTQQLLFSQAGPANMSAQAKNWLPGPCYRQQRVSTTLSQNNNSNFAWTGATKYHLNGRDSLVNPGVAMATHKDDEERFFPSSGVLMFGKQGAGKDNVDYSSVMLTSEEEIKTTNPVATEQYGVVADNLQQTNGAPIVGTVNSQGALPGMVWQNRDVYLQGPIWAKIPHTDGNFHPSPLMGGFGLKHPPPQILIKNTPVPADPPTTFSQAKLASFITQYSTGQVSVEIEWELQKENSKRWNPEIQYTSNYYKSTNVDFAVNTEGTYSEPRPIGTRYLTRNL

SEQ ID NO: 2796 - protein, 738 aa, Artificial Sequence; identical to SEQ ID NO: 2457
  Synthetic polypeptide

SEQ ID NO: 2797 - protein, 728 aa, Artificial Sequence
  Synthetic polypeptide
MAADGYLPDWLEDNLSEGIREWWDLKPGAPKPKANQQKQDDGRGLVLPGYKYLGPFNGLDKGEPVNEADAAALEHDKAYDKQLEQGDNPYLKYNHADAEFQERLQEDTSFGGNLGRAVFQAKKRVLEPLGLVEEGAKTAPGKKRPIESPDSSTGIGRKGQQPAKKKLNFGQTGDSESVPDPQPIGEPPAGPSGLGSGTMAAGGGAPMADNNEGADGVGNASGNWHCDSTWLGDRVITTSTRTWALPTYNNHLYKQISSQSGATNDNHFFGYSTPWGYFDFNRFHCHFSPRDWQRLINNNWGFRPRKLRFKLFNIQVKEVTTNDGVTTIANNLTSTIQVFSDSEYQLPYVLGSAHQGCLPPFPADVFMIPQYGYLTLNNGSQSVGRSSFYCLEYFPSQMLRTGNNFEFSYTFEEVPFHSSYAHSQSLDRLMNPLIDQYLYYLARTQSTTGSTRELQFHQAGPNTMAEQSKNWLPGPCYRQQRLSKNIDSNNNSNFAWTGATKYHLNGRNSLTNPGVAMATNKDDEDQFFPINGVLVFGKTGAANKTTLENVLMTSEEEIKTTNPVATEEYGVVSSNLQSSTAGPQTQTVNSQGALPGMVWQNRDVYLQGPIWAKIPHTDGNFHPSPLMGGFGLKHPPPQILIKNTPVPANPPEVFTPAKFASFITQYSTGQVSVEIEWELQKENSKRWNPEIQYTSNYAKSNNVEFAVNNEGVYTEPRPIGTRYLTRNL

SEQ ID NO: 2798 - DNA, 2489 bp, Artificial Sequence
  Synthetic polynucleotide
gaattcgccctttctacggctgcgtcaactggaccaatgagaactttcccttcaacgattgcgtcgacaagatggtgatctggtgggaggagggcaagatgacggccaaggtcgtgaagtccgccaaggccattcatcatctgctggggcgggctcccgagattgcttgctcggcctgcgatctggtcaacgtggacctggatgactgtgtttctgagcaataaatgacttaaaccaggtatggctgccgatggttatcttccagattggctcgaggacaacctctctgagggcattcgcgagtggtgggacttgaaacctggagccccgaaacccaaagccaaccagcaaaagcaggacgacggccggggtctggtgcttcctggctacaagtacctcggacccttcaacggactcgacaagggagagccggtcaacgaggcagacgccgcggccctcgagcacgacaaggcctacgacaagcagctcgagcagggggacaacccgtacctcaagtacaaccacgccgacgccgagtttcaggagcgtcttcaagaagatacgtcttttgggggcaacctcgggcgagcagtcttccaggccaagaagcgggttctcgaacctctcggtctggttgaggaaggcgctaagacggctcctggaaagaagagacccatagaatcccccgactcctccacgggcatcggcaggaaaggccagcagcccgctaaaaagaagctcaactttgggcagactggcgactcagagtcagtgcccgaccctcaaccaatcggagaaccccccgcaggcccctctggtctgggatctggtacaatggctgcaggcggtggcgctccaatggcagacaataacgaaggcgccgacggagtgggtaatgcctccggaaattggcattgcgattccacatggctgggcgacagagtcatcaccaccagcacccgcacctgggccctgcccacctacaacaaccacctctacaagcagatatcaagtcagagcggggctaccaacgacaaccacttcttcggctacagcaccccctggggctattttgacttcaacagattccactgccacttctcaccacgtgactggcagcgactcatcaacaacaactggggattccggcccagaaagctgcggttcaagttgttcaacatccaggtcaaggaggtcacgacgaacgacggcgttacgaccatcgccaataaccttaccagcacgattcaggtcttctcggactcggagtaccaactgccgtacgtcctcggctctgcgcaccagggctgcctccctccgttccctgcggacgtgttcatgattcctcagtacggatatctgactctaaacaacggcagtcagtctgtgggacgttcctccttctactgcctggagtactttccttctcagatgctgagaacgggcaataactttgaattcagctacacctttgaggaagtgcctttccacagcagctatgcgcacagccagagcctggaccggctgatgaatcccctcatcgaccagtacctgtactacctggcccggacccagagcactacggggtccacaagggagctgcagttccatcaggctgggcccaacaccatggccgagcaatcaaagaactggctgcccggaccctgttatcggcagcagagactgtcaaaaaacatagacagcaacaacaacagtaactttgcctggaccggggccactaaataccatctgaatggtagaaattcattaaccaacccgggcgtagccatggccaccaacaaggacgacgaggaccagttctttcccatcaacggagtgctggtttttggcaaaacgggggctgccaacaagacaacgctggaaaacgtgctaatgaccagcgaggaggagatcaaaaccaccaatcccgtggctacagaagaatacggtgtggtctccagcaacctgcaatcgtctacggccggaccccagacacagactgtcaacagccagggggctctgcccggcatggtctggcagaaccgggacgtgtacctgcagggtcccatctgggccaaaattcctcacacggacggcaactttcacccgtctcccctgatgggcggatttggactcaaacacccgcctcctcaaattctcatcaaaaacaccccggtacctgctaatcctccagaggtgtttactcctgccaagtttgcctcatttatcacgcagtacagcaccggccaggtcagcgtggagatcgagtgggaactgcagaaagaaaacagcaaacgctggaatccagagattcagtacacctcaaattatgccaagtctaataatgtggaatttgctgtcaacaacgaaggggtttatactgagcctcgccccattggcacccgttacctcacccgtaacctgtaattgcctgttaatcaataaaccggttaattcgtttcagttgaactttggtcaagggcgaattc

SEQ ID NO: 2799 - protein, 728 aa, Artificial Sequence
  Synthetic polypeptide
MAADGYLPDWLEDNLSEGIREWWDLKPGAPKPKANQQKQDDGRGLVLPGYKYLGPFNGLDKGEPVNAADAAALEHDKAYDQQLKAGDNPYLRYNHADAEFQERLQEDTSFGGNLGRAVFQAKKRVLEPLGLVEEGAKTAPGKKRPIESPDSSTGIGKKGQQPAKKKLNFGQTGDSESVPDPQPIGEPPAGPSGLGSGTMAAGGGAPMADNNEGADGVGNASGNWHCDSTWLGDRVITTSTRTWALPTYNNHLYKQISSQSGATNDNHFFGYSTPWGYFDFNRFHCHFSPRDWQRLINNNWGFRPRKLRFKLFNIQVKEVTTNDGVTTIANNLTSTIQVFSDSEYQLPYVLGSAHQGCLPPFPADVFMIPQYGYLTLNNGSQSVGRSSFYCLEYFPSQMLRTGNNFEFSYTFEEVPFHSSYAHSQSLDRLMNPLIDQYLYYLARTQSTTGSTRELQFHQAGPNTMAEQSKNWLPGPCYRRQRLSKDIDSNNNSNFAWTGATKYHLNGRNSLTNPGVAMATNKDDEDQFFPINGVLVFGKTGAANKTTLENVLMTSEEEIKTTNPVATEEYGVVSSNLQSSTAGPQTQTVNSQGALPGMVWQNRDVYLQGPIWAKIPHTDGNFHPSPLMGGFGLKHPPPQILIKNTPVPANPPEVFTPAKFASFITQYSTGQVSVEIEWELQKENSKRWNPEIQYTSNYAKSNNVEFAVNNEGVYTEPRPIGTRYLTRNL

SEQ ID NO: 2800 - DNA, 3098 bp, Artificial Sequence
  Synthetic polynucleotide
gaattcgccctttctacggctgcgtcaactggaccaatgagaactttcccttcaacgattgcgtcgacaagatggtgatctggtgggaggagggcaagatgacggccaaggtcgtggagtccgccaaggccattctcggcggcagcaaggtgcgcgtggaccaaaagtgcaagtcttccgcccagatcgatcccacccccgtgatcgtcacttccaacaccaacatgtgcgccgtgattgacgggaacagcaccaccttcgagcaccagcagccgttacaagaccggatgttcaaatttgaactcacccgccgtctggagcacgactttggcaaggtgacaaagcaggaagtcaaagagttcttccgctgggcgcaggatcacgtgaccgaggtggcgcatgagttctacgtcagaaagggtggagccaacaagagacccgcccccgatgacgcggataaaagcgagcccaagcgggcctgcccctcagtcgcggatccatcgacgtcagacgcggaaggagctccggtggactttgccgacaggtaccaaaacaaatgttctcgtcacgcgggcatgcttcagatgctgtttccctgcaagacatgcgagagaatgaatcagaatttcaacatttgcttcacgcacgggaccggagactgttcagaatgtttccccggcgtgtcagaatctcaaccggtcgtcagaaagaggacgtatcggaaactctgtgccattcatcatctgctggggcgggctcccgagattgcttgctcggcctgcgatctggtcaacgtggacctggatgactgtgtttctgagcaataaatgacttaaaccaggtatggctgccgatggttatcttccagattggctcgaggacaacctctctgagggcattcgcgagtggtgggacttgaaacctggagccccgaaacccaaagccaaccagcaaaagcaggacgacggccggggtctggtgcttcctggctacaagtacctcggacccttcaacggactcgacaagggagagccggtcaacgcggcggacgcagcggccctcgagcacgacaaggcctacgaccagcagctcaaagcgggtgacaatccgtacctgcggtataaccacgccgacgccgagtttcaggagcgtcttcaagaagatacgtcttttgggggcaacctcgggcgagcagtcttccaggccaagaagcgggttctcgaacctctcggtctggttgaggaaggcgctaagacggctcctggaaagaagagacccatagaatcccccgactcctccacgggcatcggcaagaaaggccagcagcccgctaaaaagaagctcaactttgggcagactggcgactcagagtcagtgcccgaccctcaaccaatcggagaaccccccgcaggcccctctggtctgggatctggtacaatggctgcaggcggtggcgctccaatggcagacaataacgaaggcgccgacggagtgggtaatgcctccggaaattggcattgcgattccacatggctgggcgacagagtcatcaccaccagcacccgcacctgggccctgcccacctacaacaaccacctctacaagcagatatcaagtcagagcggggctaccaacgacaaccacttcttcggctacagcaccccctggggctattttgacttcaacagattccactgccacttctcaccacgtgactggcagcgactcatcaacaacaactggggattccggcccagaaagctgcggttcaagttgttcaacatccaggtcaaggaggtcacgacgaacgacggcgttacgaccatcgctaataaccttaccagcacgattcaggtcttctcggactcggagtaccaactgccgtacgtcctcggctctgcgcaccagggctgcctccctccgttccctgcggacgtgttcatgattcctcagtacggatatctgactctaaacaacggcagtcagtctgtgggacgttcctccttctactgcctggagtactttccttctcagatgctgagaacgggcaataactttgaattcagctacacctttgaggaagtgcctttccacagcagctatgcgcacagccagagcctggaccggctgatgaatcccctcatcgaccagtacctgtactacctggcccggacccagagcactacggggtccacaagggagctgcagttccatcaggctgggcccaacaccatggccgagcaatcaaagaactggctgcccggaccctgttatcggcggcagagactgtcaaaagacatagacagcaacaacaacagtaactttgcctggaccggggccactaaataccatctgaatggtagaaattcattaaccaacccgggcgtagccatggccaccaacaaggacgacgaggaccagttctttcccatcaacggagtgctggtttttggcaaaacgggggctgccaacaagacaacgctggaaaacgtgctaatgaccagcgaggaggagatcaaaaccaccaatcccgtggctacagaagaatacggtgtggtctccagcaacctgcaatcgtctacggccggaccccagacacagactgtcaacagccagggggctctgcccggcatggtctggcagaaccgggacgtgtacctgcagggtcccatctgggccaaaattcctcacacggacggcaactttcacccgtctcccctgatgggcggatttggactcaaacacccgcctcctcaaattctcatcaaaaacaccccggtacctgctaatcctccagaggtgtttactcctgccaagtttgcctcatttatcacgcagtacagcaccggccaggtcagcgtggagatcgagtgggaactgcagaaagagaacagcaaacgctggaatccagagattcagtacacctcaaattatgccaagtctaataatgtggaatttgctgtcaacaacgaaggggtttatactgagcctcgccccattggcacccgttacctcacccgtaacctgtaattacttgttaatcaataaaccggttgattcgtttcagttgaactttggtctctgcgaagggcgaattc

SEQ ID NO: 2801 - protein, 685 aa, Artificial Sequence
  Synthetic polypeptide
MAADGYLPDWLEDNLSEGIREWWDLKPGAPKPKANQQKQDDGRGLVLPGYKYLGPFNGLDKGEPVNEADAAALEHDKAYDKQLEQGDNPYLKYNHADAEFQERLQEDTSFGGNLGRAVFQAKKRVLEPLGLVEEGAKTAPGKKRPVEPSPQRSPDSSTGIGKTGQQPAKKRLNFGQTGDSESVPDPQPIGEPPAGPSGLGSGTMAAGGGAPMADNNEGADGVGSSSGNWHCDSTWLGDRVITTSTRTWALPTYNNHLYKQISNGTSGGSTNDNTYFGYSTPWGYFDFNRFHCHFSPRDWQRLINNNWGFRPKRLNFKLFNIQVKEVTQNEGTKTIANNLTSTIQVFTDSEYQLPYVLGSAHQGCLPPFPADVFMIPQYGYLTLNNGSQAVGRSSFYCLEYFPSQMLRTGNNFEFSYQFEDVPFHSSYAHSQSLDRLTNPLIDQYLYYLARTQSTTGSTRGLQFHQAGPNTMAEQSKNWLPGPCYRQQRLSKNIDSNNNSNFAWTGATKYHLNGRNSLTNPGVAMATNKDDEDQFFPINGVLVFGKTGAANKTTLENVLMTSEEEIKTTNPVATEEYGVVSSNLQSSTAGPQTQTVNSQGALPGMVWQNRDVYLQGPIWAKIPHTDGNFHPSPLMGGFGLKHPPPQILIKYTSNYYKSTNVDFAVNTEGTYSEPRPIGTRYLTRNL

SEQ ID NO: 2802 - DNA, 2969 bp, Artificial Sequence
  Synthetic polynucleotide
gaattcgccctttctacggctgcgtcaactggaccaatgagaactttcccttcaacgattgcgtcgacaagatggtgatctggtgggaggagggcaagatgacggccaaggtcgtggagtccgccaaggccattctcggcggcagcaaggtgcgcgtggaccaaaagtgcaagtcgtccgcccagatcgaccccacccccgtgatcgtcacctccaacaccaacatgtgcgccgtgattgacgggaacagcaccaccttcgagcaccagcagccgttacaagaccggatgttcaaatttgaactcacccgccgtctggagcacgactttggcaaggtgacaaagcaggaagtcaaagagttcttccgctgggcgcaggatcacgtgaccgaggtggcgcatgagttctacgtcagaaagggtggagccaacaagagacccgcccccgatgacgcggataaaagcgagcccaagcgggcctgcccctcagtcgcggatccatcgacgtcagacgcggaaggagctccggtggactttgccgacaggtaccaaaacaaatgttctcgtcacgcgggcatgcttcagatgctgtttccctgcaagacatgcgagagaatgaatcagaatttcaacatttgcttcacgcacgggaccagagactgttcagaatgtttccccggcgtgtcagaatctcaaccggtcgtcagaaagaggacgtatcggaaactctgtgccattcatcatctgctggggcgggctcccgagattgcttgctcggcctgcgatctggtcaacgtggacctggatgactgtgtttctgagcaataaatgacttaaaccaggtatggctgccgatggttatcttccagattggctcgaggacaacctctctgagggcatccgcgagtggtgggacttgaaacctggagccccgaaacccaaagccaaccagcaaaagcaggacgacggccggggtctggtgcttcctggctacaagtacctcggacccttcaacggactcgacaagggagagccggtcaacgaggcagacgccgcggccctcgagcacgacaaggcctacgacaagcagctcgagcagggggacaacccgtacctcaagtacaaccacgccgacgccgagtttcaggagcgtcttcaagaagatacgtcttttgggggcaacctcgggcgagcagtcttccaggccaagaagcgggttctcgaacctctcggtctggttgaggaaggcgctaagacggctcctggaaagaagagaccggtagagccatcaccccagcgttctccagactcctctacgggcatcggcaagacaggccagcagcccgcgaaaaagagactcaactttgggcagactggcgactcagagtcagtgcccgaccctcaaccaatcggagaaccccccgcaggcccctctggtctgggatctggtacaatggctgcaggcggtggcgctccaatggcagacaataacgaaggcgccgacggagtgggtagttcctcaggaaattggcattgcgattccacatggctgggcgacagagtcatcaccaccagcacccgaacctgggccctccccacctacaacaaccacctctacaagcaaatctccaacgggacatcgggaggaagcaccaacgacaacacctacttcggctacagcaccccctgggggtattttgactttaacagattccactgccacttctcaccacgtgactggcagcgactcatcaacaacaactggggattccggcccaagagactcaacttcaagctcttcaacatccaggtcaaggaggtcacgcagaatgaaggcaccaagaccatcgccaataaccttaccagcacgattcaggtctttacggactcggaataccagctcccgtacgtcctcggctctgcgcaccagggctgcctgcctccgttcccggcggacgtcttcatgattcctcagtacgggtacctgactctgaacaacggcagtcaggccgtgggccgttcctccttctactgcctggagtactttccttctcaaatgctgagaacgggcaacaactttgagttcagctaccagtttgaggacgtgccttttcacagcagctacgcgcacagccaaagcctggaccggctgacgaaccccctcatcgaccagtacctgtactacctggcccggacccagagcactacggggtccacaagggggctgcagttccatcaggctgggcccaacaccatggccgagcaatcaaagaactggctgcccggaccctgttatcggcagcagagactgtcaaaaaacatagacagcaacaacaacagtaactttgcctggaccggggccactaaataccatctgaatggtagaaattcattaaccaacccgggcgtagccatggccaccaacaaggacgacgaggaccagttctttcccatcaacggagtgctggtttttggcaaaacgggggctgccaacaagacaacgctggaaaacgtgctaatgaccagcgaggaggagatcaaaaccaccaatcccgtggctacagaagaatacggtgtggtctccagcaacctgcaatcgtctacggccggaccccagacacagactgtcaacagccagggggctctgcccggcatggtctggcagaaccgggacgtgtacctgcagggtcccatctgggccaaaattcctcacacggacggcaactttcacccgtctcccctgatgggcggatttggactcaaacacccgcctcctcaaattctcatcaagtatacttccaactactacaaatctacaaatgtggactttgctgtcaatactgagggtacttattcagagcctcgccccattggcacccgttacctcacccgtaacctgtaattgcctgttaatcaataaaccggttaattcgtttcagttgaactttggtctctgcgaagggcgaattc

SEQ ID NO: 2803 - protein, 733 aa, Artificial Sequence
  Synthetic polypeptide
MAADGYLPDWLEDNLSEGIREWWDLKPGAPKPKANQQKQDDGRGLVLPGYKYLGPFNGLDKGEPVNAADAAALEHDKAYDQQLKAGDNPYLRYNHADAEFQERLQEDTSFGGNLGRAVFQAKKRVLEPLGLVEEGAKTAPGKKRPIESPDSSTGIGKKGQQPAKKKLNFGQTGDSESVPDPQPIGEPPAGPSGLGSGTMAAGGGAPMADNNEGADGVGSSSGNWHCDSTWLGDRVITTSTRTWALPTYNNHLYKQISNGTSGGSTNDNTYFGYSTPWGYFDFNRFHCHFSPRDWQRLINNNWGFRPKRLNFKLFNIQVKEVTQNEGTKTIANNLTSTIQVFTDSEYQLPYVLGSAHQGCLPPFPADVFMIPQYGYLTLNNGSQAVGRSSFYCLEYFPSQMLRTGNNFEFSYQFEDVPFHSSYAHSQSLDRLMNPLIDQYLYYLSRTQSTGGTAGTQQLLFSQAGPNNMSAQAKNWLPGPCYRQQRVSTTVSQNNNSNFAWTGATKYHLNGRDSLVNPGVAMATHKGDEERFFPSSGVLMFGKQGAGKDNVDYSSVMLTSEEEIKTTNPVATEQYGVVADNLQQQNAAPIVGAVNSQGALPGMVWQNRDVYLQGPIWAKIPHTDGNFHPSPLMGGFGLKHPPPQILIKNTPVPADPPTTFSQAKLASFITQYSTGQVSVEIEWELQKENSKRWNPEIQYTSNYYKSTNVDFAVNTEGTYSEPRPIGTRYLTRSL

SEQ ID NO: 2804 - DNA, 3113 bp, Artificial Sequence
  Synthetic polynucleotide
gaattcgccctttctacggctgcgtcaactggaccaatgagaactttcccttcaacgattgcgtcgacaagatggtgatctggtgggaggagggcaagatgacggccaaggtcgtggagtccgccaaggccattctcggcggcagcaaggtgcgcgtggaccaaaagtgcaagtcgtccgcccagatcgatcccacccccgtgatcgtcacttccaacaccaacatgtgcgccgtgattgacgggaacagcaccaccttcgagcaccagcagccgttacaagaccggatgttcaaatttgaactcacccgccgtctggagcatgactttggcaaggtgacaaagcaggaagtcaaagagttcttccgctgggcgcaggatcacgtgaccgaggtggcgcatgagttctacgtcagaaagggtggagccaacaagagacccgcccccgatgacgcggataaaagcgagcccaagcgggcctgcccctcagtcgcggatccatcgacgtcagacgcggaaggagctccggtggactttgccgacaggtaccaaaacaaatgttctcgtcacgcgggcatgcttcagatgctgtttccctgcaagacatgcgagagaatgaatcagaatttcaacatttgcttcacgcacgggaccagagactgttcagaatgtttccccggcgtgtcagaatctcaaccggtcgtcagaaagaggacgtatcggaaactctgtgccattcatcatctgctggggcgggctcccgagattgcttgctcggcctgcgatctggtcaacgtggacctggatgactgtgtttctgagcaataaatgacttaaaccaggtatggctgccgatggttatcttccagattggctcgaggacaacctctctgagggcattcgcgagtggtgggacttgaaacctggagccccgaaacccaaagccaaccagcaaaagcaggacgacggccggggtctggtgcttcctggctacaagtacctcggacccttcaacggactcgacaagggggagcccgtcaacgcggcggacgcagcggccctcgagcacgacaaggcctacgaccagcagctcaaagcgggtgacaatccgtacctgcggtataaccacgccgacgccgagtttcaggagcgtcttcaagaagatacgtcttttgggggcaacctcgggcgagcagtcttccaggccaagaagcgggttctcgaacctctcggtctggttgaggaaggcgctaagacggctcctggaaagaagagacccatagaatcccccgactcctccacgggcatcggcaagaaaggccagcagcccgctaaaaagaagctcaactttgggcagactggcgactcagagtcagtgcccgaccctcaaccaatcggagaaccccccgcaggcccctctggtctgggatctggtacaatggctgcaggcggtggcgctccaatggcagacaataacgaaggcgccgacggagtgggtagttcctcaggaaattggcattgcgattccacatggctgggcgacagagtcatcaccaccagcacccgaacctgggccctccccacctacaacaaccacctctacaagcaaatctccaacgggacatcgggaggaagcaccaacgacaacacctacttcggctacagcaccccctgggggtattttgactttaacagattccactgccacttctcaccacgtgactggcagcgactcatcaacaacaactggggattccggcccaagagactcaacttcaagctcttcaacatccaggtcaaggaggtcacgcagaatgaaggcaccaagaccatcgccaataaccttaccagcacgattcaggtctttacggactcggaataccagctcccgtacgtcctcggctctgcgcaccagggctgcctgcctccgttcccggcggacgtcttcatgattcctcagtacgggtacctgactctgaacaacggcagtcaggccgtgggccgttcctccttctactgcctggagtactttccttctcaaatgctgagaacgggcaacaactttgagttcagctaccagtttgaggacgtgccttttcacagcagctatgcgcacagccaaagcctggaccggctgatgaaccccctcatcgaccagtacctgtactacctgtctcggactcagtccacgggaggtaccgcaggaactcagcagttgctattttctcaggccgggcctaataacatgtcggctcaggccaaaaactggctacccgggccctgctaccggcagcaacgcgtctccacgacagtgtcgcaaaataacaacagcaactttgcttggaccggtgccaccaagtatcatctgaatggcagagactctctggtaaatcccggtgtcgctatggcaacgcacaagggcgacgaagagcgattttttccatccagcggagtcttgatgtttgggaaacagggagctggaaaagacaacgtggactatagcagcgttatgctaaccagtgaggaagaaatcaaaaccaccaacccagtggccacagaacagtacggcgtggtggccgataacctgcaacagcaaaacgccgctcctattgtaggggccgtcaacagtcaaggagccttacctggcatggtctggcagaaccgggacgtgtacctgcagggtcctatctgggccaagattcctcacacggacggcaactttcatccttcgccgctgatgggaggctttggactgaaacacccgcctcctcagatcctgattaagaatacacctgttcccgcggatcctccaactaccttcagtcaagccaagctggcgtcgttcatcacgcagtacagcaccggacaggtcagcgtggaaattgaatgggagctgcagaaagagaacagcaagcgctggaacccagagattcagtatacttccaactactacaaatctacaaatgtggactttgctgtcaatactgagggtacttattcagagcctcgccccattggcacccgttacctcacccgtagcctgtaattgcctgttaatcaataaaccggttgattcgtttcagttgaactttggtctctgcgaagggcgaattc

SEQ ID NO: 2805 - protein, 738 aa, Artificial Sequence
  Synthetic polypeptide
MAADGYLPDWLEDNLSEGIREWWDLKPGAPKPKANQQKQDDGRGLVLPGYKYLGPFNGLDKGEPVNAADAAALEHDKAYDQQLKAGDNPYLRYNHADAEFQERLQEDTSFGGNLGRAVFQAKKRVLEPLGLVEEGAKTAPGKKRPVEPSPQRSPDSSTGIGKTGQQPAKKRLNFGQTGDSESVPDPQPIGEPPAGPSGLGSGTMAAGGGAPMADNNEGADGVGSSSGNWHCDSTWLGDRVITTSTRTWALPTYNNHLYKQISNGTSGGSTNDNTYFGYSTPWGYFDFNRFHCHFSPRDWQRLINNNWGFRPKRLNFKLFNIQVKEVTQNEGTKTIANNLTSTIQVFTDSEYQLPYVLGSAHQGCPPPFPADVFMIPQYGYLTLNNGSQAVGRSSFYCLEYFPSQMRRTGNNFEFSYQFEDVPFHSSYAHSQSLDRLMNPLIDQYLYYLSRTQSTGGTAGTQQLLFSQAGPNNMSAQAKNWLPGPCYRQQRVSTTLSQNNNSNFAWTGATKYHLNGRDSLVNPGVAMATHKDDEERFFPSSGVLMFGKQGAGKDNVDYSSVMLTSEEEIKTTNPVATEQYGVVADNLQQQNAAPIVGAVNSQGALPGMVWQNRDVYLQGPIWAKIPHTDGNFHPSPLMGGFGLKHPPPQILIKNTPVPADPPTTFSQAKLASFITQYSTGQVSVEIEWELQKENSKRWNPEIQYTSNYYKSTNVDFAVNTEGTYSEPRPIGTRYLTRNL

SEQ ID NO: 2806 - DNA, 3128 bp, Artificial Sequence
  Synthetic polynucleotide
gaattcgccctttctacggctgcgtcaactggaccaatgagaactttcccttcaacgattgcgtcgacaagatggtgatctggtgggaggagggcaagatgacggccaaggtcgtggagtccgccaaggccattctcggcggcagcaaggtgcgcgtggaccaaaagtgcaagtcgtccgcccagatcgaccccacccccgtgatcgtcacctccaacaccaacatgtgcgccgtgattgacgggaacagcaccaccttcgagcaccagcagccgttgcaggaccggatgttcaaatttgaactcacccgccgtctggagcatgactttggcaaggtgacaaagcaggaagtcaaagagttcttccgctgggcgcaggatcacgtgaccgaggtggcgcatgagttctacgtcagaaagggtggagccaacaagagacccgcccccgatgacgcggataaaagcgagcccaagcgggcctgcccctcagtcgcggatccatcgacgtcagacgcggaaggagctccggtggactttgccgacaggtaccaaaacaaatgttctcgtcacgcgggcatgcttcagatgctgtttccctgcaagacatgcgagagaatgaatcagaatttcaacatttgcttcacgcgcgggaccagagactgttcagaatgtttcccgggcgtgtcagaatctcaaccggtcgtcagaaagaggacgtatcggaaactctgtgccattcatcatctgctggggcgggctcccgagattgcttgctcggcctgcgatctggtcaacgtggacctggatgactgtgtttctgagcaataaatgacttaaaccaggtatggctgccgatggttatcttccagattggctcgaggacaacctctctgagggcattcgcgagtggtgggacttgaaacctggagccccgaaacccaaagccaaccagcaaaagcaggacgacggccggggtctggtgcttcctggctacaagtacctcggacccttcaacggactcgacaagggggagcccgtcaacgcggcggacgcagcggccctcgagcacgacaaggcctacgaccagcagctcaaagcgggtgacaatccgtacctgcggtataaccacgccgacgccgagtttcaggagcgtctgcaagaagatacgtcttttgggggcaacctcgggcgagcagtcttccaggccaagaagcgggttctcgaacctctcggtctggttgaggaaggcgctaagacggctcctggaaagaagagaccggtagagccatcaccccagcgttctccagactcctctacgggcatcggcaagacaggccagcagcccgcgaaaaagagactcaactttgggcagactggcgactcagagtcagtgcccgaccctcaaccaatcggagaaccccccgcaggcccctctggtctgggatctggtacaatggctgcaggcggtggcgctccaatggcagacaataacgaaggcgccgacggagtgggtagttcctcaggaaattggcattgcgattccacatggctgggcgacagagtcatcaccaccagcacccgaacctgggccctccccacctacaacaaccacctctacaagcaaatctccaacgggacatcgggaggaagcaccaacgacaacacctacttcggctacagcaccccctgggggtattttgactttaacagattccactgccacttctcaccacgtgactggcagcgactcatcaacaacaactggggattccggcccaagagactcaacttcaagctcttcaacatccaggtcaaggaggtcacgcagaatgaaggcaccaagaccatcgccaataaccttaccagcacgattcaggtctttacggactcggaataccagctcccgtacgtcctcggctctgcgcaccagggctgcccgcctccgttcccggcggacgtcttcatgattcctcagtacgggtacctgactctgaacaacggcagtcaggccgtgggccgttcctccttctactgcctggagtactttccttctcaaatgcggagaacgggcaacaactttgagttcagctaccagtttgaggacgtgccttttcacagcagctacgcgcatagccaaagcctggaccggctgatgaaccccctcatcgaccagtacctgtactacctgtctcggactcagtccacgggaggtaccgcaggaactcagcagttgctattttctcaggccgggcctaataacatgtcggctcaggccaaaaactggctacccgggccctgctaccggcagcaacgcgtctccacgacactgtcgcaaaataacaacagcaactttgcttggaccggtgccaccaagtatcatctgaatggcagagactctctggtaaatcccggtgtcgctatggcaacgcacaaggacgacgaagagcgattttttccatccagcggagtcttgatgtttgggaaacagggagctggaaaagacaacgtggactatagcagcgttatgctaaccagtgaggaagaaatcaaaaccaccaacccagtggccacagaacagtacggcgtggtggccgataacctgcaacagcaaaacgccgctcctattgtaggggccgtcaacagtcaaggagccttacctggcatggtctggcagaaccgggacgtgtacctgcagggtcctatctgggccaagattcctcacacggacggcaactttcatccttcgccgctgatgggaggctttggactgaaacacccgcctcctcagatcctgattaagaatacacctgttcccgcggatcctccaactaccttcagtcaagccaagctggcgtcgttcatcacgcagtacagcaccggacaggtcagcgtggaaattgaatgggagctgcagaaagagaacagcaagcgctggaacccagagattcagtatacttccaactactacaaatctacaaatgtggactttgctgtcaatactgagggtacttattcagagcctcgccccattggcacccgttacctcacccgtaacctgtaattgcctgttaatcaataaaccggttaattcgtttcagttgaactttggtctctgcgaagggcgaattc

SEQ ID NO: 2807 - protein, 738 aa, Artificial Sequence; identical to SEQ ID NO: 2795
  Synthetic polypeptide

SEQ ID NO: 2808 - DNA, 1933 bp, Artificial Sequence
  Synthetic polynucleotide
  modified_base (1302)..(1302): a, c, g, or t
  misc_feature (1302)..(1302): n is a, c, g, or t
caaggcctacgaccagcagctcaaagcgggtgacaatccgtacctgcggtataaccacgccgacgccgagtttcaggagcgtcttcaagaagatacgtcttttgggggcaacctcgggcgagcagtcttccaggccaaaaagcgggttctcgaacctcttggtctggttgagacgccagctaagacggcacctggaaagaagcgaccggtagactcgccagactccacctcgggcatcggcaagaaaggccagcagcccgcgaaaaagagactcaactttgggcagactggcgactcagagtcagtccccgaccctcaaccaatcggagaaccaccagcaggcccctctggtctgggatctggtacaatggctgcaggcggtggcgcaccaatggctgacaataacgagggcgccgacggagtgggtaatgcctcaggaaattggcattgcgattccacatggctgggcgacagagtcatcaccaccagcacccgaacctgggccctgcccacctacaacaaccacctctacaagcaaatctccagtcagtcagcagggagcaccaacgataacgtctatttcggctacagcaccccctgggggtattttgacttcaacagattccattgccacttctcaccacgtgactggcagcgacttatcaacaacaactggggattccggcccaagaagctcaacttcaagctcttcaacatccaggtcaaggaggtcacgacgaatgacggtgtcacaaccatcgctaataaccttaccagcacggttcaggtcttttcggactcggaatatcaactgccgtacgtcctcggctccgcgcaccagggctgcctgcctccgttcccggcagacgtgttcatgattccgcagtacggatacctgactctgaacaatggcagccaatcggtaggccgttcctccttctactgcctggagtactttccttctcagatgctgagaacgggcaacaacttcacctttagctacaccttcgaggacgtgcctttccacagcagctacgcgcacagccagagtctggaccggctgatgaatcccctcatcgaccagtacctgtactacttggccagaacacagagcaacgcaggaggtactgctggcaatcgggaactgcagttttatcagggcggacctaccaccatggccgaacaagcaaagaactggctgcccggaccttgcttccggcaacagagagtatccaagacgctggatcaaaataacaacagcaactttgcctggactggtgccacaaaataccatttaaatgnaagaaattcattggttaatcccggtgtcgccatggcaacccacaaggacgacgaggaacgcttcttcccttcgagcggagttctaatttttggcaaaactggagcagctaataaaactacattagaaaacgtgctcatgacaaatgaagaagaaattcgtcctaccaacccggtagctaccgaggaatacgggattgtaagcagcaacttgcaggcggctagcaccgcagcccagacacaagttgttaacaaccagggagccttacctggcatggtctggcagaaccgggacgtgtacctgcaaggtcccatttgggccaagattcctcacacggacggcaactttcacccgtctcctctaatgggtggctttggactgaaacacccgcctccccagatcctgatcaaaaacacaccggtacctgctaatcctccagaagtgtttactcctgccaagtttgcttccttcatcacgcagtacagcaccgggcaagtcagcgttgagatcgagtgggagctgcagaaagagaacagcaagcgctggaacccagagattcagtacacctccaactttgacaaacagactggagtggactttgctgttgacagccagggtgtttactctgagcct

SEQ ID NO: 2809 - protein, 733 aa, Artificial Sequence
  Synthetic polypeptide
MAADGYLPDWLEDNLSEGIREWWDLKPGAPKPKANQQKQDDGRGLVLPGYKYLGPFNGLDKGEPVNAADAAALEHDKAYDQQLKAGDNPYLRYNHADAEFQERLQEDTSFGGNLGRAVFQAKKRVLEPLGLVEEGAKTAPGKKRPLESPQEPDSSSGIGKKGKQPAKKRLNFEEDTGAGDGPPEGSDTSAMSSDIEMRAAPGGNAVDAGQGSDGVGNASGDWHCDSTWSEGKVTTTSTRTWVLPTYNNHLYLRLGTTSNSNTYNGFSTPWGYFDFNRFHCHFSPRDWQRLINNNWGLRPKAMRVKIFNIQVKEVTTSNGETTVANNLTSTVQIFADSSYELPYVMDAGQEGSLSPFPNDVFMVPQYGYCGIVTGENQNQTDRNAFYCLEYFPSQMLRTGNNFEMAYNFGKVPFHSMYAYSQSPDRLMNPLLDQYLWHLQSTTSGETLNQGNAATTFGKIRSGDFAFYRKNWLPGPCVKQQRLSKTASQNYKIPASGGNALLKYDTHYTLNNRWSNIAPGPPMATAGPSDGDFSNAQLIFPGPSVTGNTTTSANNLLFTSEEEIAATNPRDTDMFGQIADNNQNATTAPITGNVTAMGVLPGMVWQNRDIYYQGPIWAKIPHADGHFHPSPLIGGFGLKHPPPQIFIKNTPVPANPATTFTAARVDSFITQYSTGQVAVQIEWEIEKERSKRWNPEVQFTSNYGNQSSMLWAPDTTGKYTEPRVIGSRYLTNHL

SEQ ID NO: 2810 - DNA, 3105 bp, Artificial Sequence
  Synthetic polynucleotide
gaattcgcccttgctgcgtcaactggaccaatgagaactttcccttcaacgattgcgtcgacaagatggtgatctggtgggaggagggcaagatgaccgccaaggtcgtggagtccgccaaggccattctgggcggaagcaaggtgcgcgtggaccaaaagtgcaagtcatcggcccagatcgaccccacgcccgtgatcgtcacctccaacaccaacatgtgcgccgtgatcgacgggaacagcaccaccttcgagcaccagcagccgctgcaggaccgcatgttcaagttcgagctcacccgccgtctggagcacgactttggcaaggtgaccaagcaggaagtcaaagagttcttccgctgggctcaggatcacgtgactgaggtggcgcatgagttctacgtcagaaagggcggagccaccaaaagacccgcccccagtgacgcggatataagcgagcccaagcgggcctgcccctcagttgcggagccatcgacgtcagacgcggaagcaccggtggactttgcggacaggtaccaaaacaaatgttctcgtcacgcgggcatgcttcagatgctgtttccctgcaagacatgcgagagaatgaatcagaatttcaacgtctgcttcacgcacggggtcagagactgctcagagtgcttccccggcgcgtcagaatctcaacccgtcgtcagaaaaaagacgtatcagaaactgtgcgcgattcatcatctgctggggcgggcacccgagattgcgtgttcggcccgcgatctcgtcaacgtggacttggatgactgtgtttctgagcaataaatgacttaaaccaggtatggctgctgacggttatcttccagattggctcgaggacaacctctctgagggcattcgcgagtggtgggacctgaaacctggagcccccaagcccaaggccaaccagcagaagcaggacgacggccggggtctggtgcttcctggctacaagtacctcggacccttcaacggactcgacaagggggagcccgtcaacgcggcggacgcagcggccctcgagcacgacaaggcctacgaccagcagctcaaagcgggtgacaatccgtacctgcggtataaccacgccgacgccgagtttcaggagcgtctgcaagaagatacgtcttttgggggcaacctcgggcgagcagtcttccaggccaagaagagggtactcgaacctctgggcctggttgaagaaggtgctaagacggctcctggaaagaagagaccgttagagtcaccacaagagcccgactcctcctcaggaatcggcaaaaaaggcaaacaaccagccaaaaagagactcaactttgaagaggacactggagccggagacggaccccctgaaggatcagataccagcgccatgtcttcagacattgaaatgcgtgcagcaccgggcggaaatgctgtcgatgcgggacaaggttccgatggagtgggtaatgcctcgggtgattggcattgcgattccacctggtctgagggcaaggtcacaacaacctcgaccagaacctgggtcttgcccacctacaacaaccacttgtacctgcggctcggaacaacatcaaacagcaacacctacaacggattctccaccccctggggatactttgactttaacagattccactgtcacttctcaccacgtgactggcaaagactcatcaacaacaactggggactacgaccaaaagccatgcgcgttaaaatcttcaatatccaagttaaggaggtcacaacgtcgaacggcgagactacggtcgctaataaccttaccagcacggttcagatatttgcggactcgtcgtatgagctcccgtacgtgatggacgctggacaagagggaagtctgtctcctttccccaatgacgtcttcatggtgcctcaatatggctactgtggcattgtgactggcgaaaatcagaaccagacggacagaaatgctttctactgcctggagtattttccttcacaaatgctgagaactggcaataactttgaaatggcttacaactttgggaaggtgccgttccactcaatgtatgcttacagccagagcccggacagactgatgaatcccctcctggaccagtacctgtggcacttacagtcgaccacctctggagagactctgaatcaaggcaatgcagcaaccacatttggaaaaatcaggagtggagactttgccttttacagaaagaactggctgcctgggccttgtgttaaacagcagagactctcaaaaactgccagtcaaaattacaagattcctgccagcgggggcaacgctctgttaaagtatgacacccactataccttaaacaaccgctggagcaacatagcgcctggacctccaatggcaacagctggaccttcagatggggacttcagcaacgcccagctcatcttccctggaccatcagtcaccggaaacacaacaacctcagcaaacaatctgttgtttacatcagaagaagaaattgctgccaccaacccaagagacacggacatgtttggtcagattgctgacaataatcagaatgctacaactgctcccataaccggcaacgtgactgctatgggagtgcttcctggcatggtgtggcaaaacagagacatttactaccaagggccaatttgggccaagatcccacacgcggacggacattttcatccttcaccgctaattggcggttttggactgaaacatccgcctccccagatatttatcaaaaacacccccgtacctgccaatcctgcgacaaccttcactgcagccagagtggactctttcatcacacaatacagcaccggccaggtcgctgttcagattgaatgggaaatcgaaaaggaacgctccaaacgctggaatcctgaagtgcagtttacttcaaactatgggaaccagtcttctatgttgtgggctcccgatacaactgggaagtatacagagccgcgggttattggctctcgttatttgactaatcatttgtaactgcctagttaatcaataaaccgtgtgattcgtttcagttgaactttggtctctgcgaagggcgaattc

SEQ ID NO: 2811 - protein, 733 aa, Artificial Sequence
  Synthetic polypeptide
MAADGYLPDWLEDNLSEGIREWWDLKPGAPKPKANQQKQDDGRGLVLPGYKYLGPFNGLDKGEPVNAADAAALEHDKAYDQQLKAGDNPYLRYNHADAEFQERLQEDTSFGGNLGRAVFQAKKRVLEPLGLVEEGAKTAPGKKRPLESPQEPDSSSGIGKKGKQPAKKRLNFEEDTGAGDGPPEGSDTSAMSSDIEMRAAPGGNAVDAGQGSDGVGNASGDWHCDSTWSEGKVTTTSTRTWVLPTYNNHLYLRLGTTSNSNTYNGFSTPWGYFDFNRFHCHFSPRDWQRLINNNWGLRPKAMRVKIFNIQVKEVTTSNGETTVANNLTSTVQIFADSSYELPYVMDAGQEGSLPPFPNDVFMVPQYGYCGIVTGENQNQTDRNAFYCLEYFPSQMLRTGNNFEMAYNFEKVPFHSMYAHSQSLDRLMNPLLDQYLWHLQSTTSGETLNQGNAATTFGKIRSGDFAFYRKNWLPGPCVKQQRFSKTASQNYKIPASGGNALLKYDTHYTLNNRWSNIAPGPPMATAGPSDGDFSNAQLIFPGPSVTGNTTTSANNLLFTSEEEIAATNPRDTDMFGQIADNNQNATTAPITGNVTAMGVLPGMVWQNRDIYYQGPIWAKIPHADGHFHPSPLIGGFGLKHPPPQIFIKNTPVPANPATTFTAARVDSFITQYSTGQVAVQIEWEIEKERSKRWNPEVQFTSNYGNQSSMLWAPDTTGKYTEPRVIGSRYLTNHL

SEQ ID NO: 2812 - DNA, 3105 bp, Artificial Sequence
  Synthetic polynucleotide
gaattcgcccttgctgcgtcaactggaccaatgagaactttcccttcaacgattgcgtcgacaagatggtgatctggtgggaggagggcaagatgaccgccaaggtcgtggagtccgccaaggccattctgggcggaagcaaggtgcgcgtggaccaaaagtgcaagtcatcggcccagatcgaccccacgcccgtgatcgtcacctccaacaccaacatgtgcgccgtgatcgacgggaacagcaccaccttcgagcaccagcagccgctgcaggaccgcatgttcaagttcgagctcacccgccgtctggagcacgactttggcaaggtgaccaagcaggaagtcaaagagttcttccgctgggctcaggatcacgtgactgaggtggcgcatgagttctacgtcagaaagggcggagccaccaaaagacccgcccccagtgacgcggatataagcgagcccaagcgggcctgcccctcagttgcggagccatcgacgtcagacgcggaagcaccggtggactttgcggacaggtaccaaaacaaatgttctcgtcacgcgggcatgcttcagatgctgtttccctgcaagacatgcgagagaatgaatcagaatttcaacgtctgcttcacgcacggggtcagagactgctcagagtgcttccccggcgcgtcagaatctcaacccgtcgtcagaaaaaagacgtatcagaaactgtgcgcgattcatcatctgctggggcgggcacccgagattgcgtgttcggcctgcgatctcgtcaacgtggacttggatgactgtgtttctgagcaataaatgacttaaaccaggtatggctgctgacggttatcttccagattggctcgaggacaacctctctgagggcattcgcgagtggtgggacctgaaacctggagcccccaagctcaaggccaaccagcagaagcaggacgacggccggggtctggtgcttcctggctacaagtacctcggacccttccacggactcgacaagggggagcccgtcaacgcggcggacgcagcggccctcgagcacgacaaggcctacgaccagcagctcaaagcgggtgacaatccgtacctgcggtataaccacgccgacgccgagtttcaggagcgtctgcaagaagatacgtcttttgggggcaacctcgggcgagcagtcttccaggccaagaagagggtactcgaaccactgggcctggttgaagaaggtgctaagacggctcctggaaagaagagaccgttagagtcaccacaagagcccgactcctcctcaggaatcggcaaaaaaggcaaacaaccagccaaaaagagactcaactttgaagaggacactggagccggagacggaccccctgaaggatcagataccagcgccatgtcttcagacattgaaatgcgtgcagcaccgggcggaaatgctgtcgatgcgggacaaggttccgatggagtgggtaatgcctcgggtgattggcattgcgattccacctggtctgagggcaaggtcacaacaacctcgaccagaacctgggtcttgcccacctacaacaaccacttgtacctgcggctcggaacaacatcaaacagcaacacctacaacggattctccaccccctggggatactttgactttaacagattccactgtcacttctcaccacgtgactggcaaagactcatcaacaacaactggggactacgaccaaaagccatgcgcgttaaaatcttcaatatccaagttaaggaggtcacaacgtcgaacggcgagactacggtcgctaataaccttaccagcacggttcagatatttgcggactcgtcgtatgagctcccgtacgtgatggacgctggacaagagggaagtctgcctcctttccccaatgacgtcttcatggtgcctcaatatggctactgtggcattgtgactggcgaaaatcagaaccagacggacagaaatgctttctactgcctggagtattttccttcacaaatgctgagaactggcaataactttgaaatggcttacaactttgagaaggtgccgttccactcaatgtatgctcacagccagagcctggacagactgatgaatcccctcctggaccagtacctgtggcacttacagtcgaccacctctggagagactctgaatcaaggcaatgcagcaaccacatttggaaaaatcaggagtggagactttgccttttacagaaagaactggctgcctgggccttgtgttaaacagcagagattctcaaaaactgccagtcaaaattacaagattcctgccagcgggggcaacgctctgttaaagtatgacacccactataccttaaacaaccgctggagcaacatagcgcctggacctccaatggcaacagctggaccttcagatggggacttcagcaacgcccagctcatcttccctggaccatcagtcaccggaaacacaacaacctcagcaaacaatctgttgtttacatcagaaggagaaattgctgccaccaacccaagagacacggacatgtttggtcagattgctgacaataatcagaatgctacaactgctcccataaccggcaacgtgactgctatgggagtgcttcctggcatggtgtggcaaaacagagacatttactaccaagggccaatttgggccaagatcccacacgcggacggacattttcatccttcaccgctaattggcggttttggactgaaacatccgcctccccagatatttatcaaaaacacccccgtacctgccaatcctgcgacaaccttcactgcagccagagtggactctttcatcacacaatacagcaccggccaggtcgctgttcagattgaatgggaaatcgaaaaggaacgctccaaacgccggaatcctgaagtgcagtttacttcaaactatgggaaccagtcttctatgttgtgggctcccgatacaactgggaagtatacagagccgcgggttattggctctcgttatttgactaatcatttgtaactgcctagttaatcaataaaccgtgtgattcgtttcagttgaactttggtctctgcgaagggcgaattc

SEQ ID NO: 2813 - protein, 733 aa, Artificial Sequence
  Synthetic polypeptide
MAADGYLPDWLEDNLSEGIREWWDLKPGAPKPKANQQKQDDGRGLVLPGYEYLGPFNGLDKGEPVNAADAAALEHDKAYDQQLKAGDNPYLRYNHADAEFQERLQEDTSFGGNLGRAVFQAKKRVLEPLGLVEEGAKTAPGKKRPLESPQEPDSSSGIGKKGKQPAKKRLNFEEDTGAGDGPPEGSDTSAMSSDIEMRAAPGGNAVDAGQGSDGVGNASGDWHCDSTWSEGKVTTTSTRTWVLPTYNNHLYLRLGTTSNSNTYNGFSTPWGYFDFNRFHCHFSPRDWQRLINNNWGLRPKAMRVKIFNIQVKEVTTSNGETTVANNLTSTVQIFADSSYELPYVMDAGQEGSLPPFPNDVFMVPQYGYCGIVTGENQNQTDRNAFYCLEYFPSQMLRTGNNFETAYNFEKVPFHSMYAHSQSLDGLMNPLLDQYLWHLQSTTSGETLNQGNAATTFGKIRSGDFAFYRKNWLPGPCVKQQRFSKTASQNYKIPASGGNALLKYDTHYTLNNRWSNIAPGPPMATAGPSDGDFSNAQLIFPGPSVTGNTTTSANNLLFTSEEEIAATNPRDTDMFGQIADNNQNATTAPITGNVTAMGVLPGMVWQNRDIYYQGPIWAKIPHADGHFHPSPLIGGFGLKHPPPQIFIKNTPVPAYPATTFTAARVDSFITQYSTGQVAVQIEWEIEKERSKRWNPEVQFTSNCGNQSSMLWAPDTTGKYTEPRVIGSRYLTNHL

SEQ ID NO: 2814 - DNA, 3105 bp, Artificial Sequence
  Synthetic polynucleotide
gaattcgcccttcgcagagaccaaagttcaactgaaacgaatcacacggtttattgattaactaggcagttacaaatgattagtcaaataacgagagccaataacccgcggctctgtatacttcccagttgtatcgggagcccacaacatagaagactggttcccacagtttgaagtaaactgcacttcaggattccagcgtttggagcgttccttttcgatttcccattcaatctgaacagcgacctggccggtgctgtattgtgtgatgaaagagtccactctggctgcagtgaaggttgtcgcaggataggcaggtacgggggtgtttttgataaatatctggggaggcggatgtttcagtccaaaaccgccaattagcggtgaaggatgaaaatgtccgtccgcgtgtgggatcttggcccaaattggcccttggtagtaaatgtctctgttttgccacaccatgccaggaagcactcccatagcagtcacgttgccggttatgggagcagttgtagcattctgattattgtcagcaatctgaccaaacatgtccgtgtctcttgggttggtggcagcaatttcttcttctgatgtaaacaacagattgtttgctgaggttgttgtgtttccggtgactgatggtccagggaagatgagctgggcgttgctgaagtccccatctgaaggtccagctgttgccattggaggtccaggcgctatgttgctccagcggttgtttaaggtatagtgggtgtcatactttaacagagcgttgcccccgctggcaggaatcttgtaattttgactggcagtttttgagaatctctgctgtttaacacaaggcccaggcagccagttctttctgtaaaaggcaaagtctccactcctgatttttccaaatgtggttgctgcattgccttgattcagagtctctccagaggtggtcgactgtaagtgccacaggtactggtccaggaggggattcatcagtccgtccaggctctggctgtgagcatacattgagtggaacggcaccttctcaaagttgtaagccgtttcaaagttattgccagttctcagcatttgtgaaggaaaatactccaggcagtagaaagcatttctgtccgtctggttctgattttcgccagtcacaatgccacagtagccatattgaggcaccatgaagacgtcattggggaaaggaggcagacttccctcttgtccagcgtccatcacgtacgggagctcatacgacgagtccgcaaatatctgaaccgtgctggtaaggttattagcgaccgtagtctcgccgttcgacgttgtgacctccttaacttggatattgaagattttaacgcgcatggcttttggtcgtagtccccagttgttgttgatgagtctttgccagtcacgtggtgagaagtgacagtggaatctgttaaagtcaaagtatccccagggggtggagaatccgttgtaggtgttgctgtttgatgttgttccgagccgcaggtacaagtggttgttgtaggtgggcaagacccaggttctggtcgaggttgttgtgaccttgccctcagaccaggtggaatcgcaatgccaatcacccgaggcattacccactccatcggaaccttgtcccgcatcgacagcatttccgcccggtgctgcacgcatttcaatgtctgaagacatggcgctggtatctgatccttcagggggtccgtctccggctccagtgtcctcttcaaagttgagtctctttttggctggttgtttgccttttttgccgattcctgaggaggagtcgggctcttgtggtgactctaacggtctcttctttccaggagccgtcttagcaccttcttcaaccaggcccagaggttcgagtaccctcttcttggcctggaagactgctcgcccgaggttgcccccaaaagacgtatcttcttgcagacgctcctgaaactcggcgtcggcgtggttataccgcaggtacggattgtcacccgctttgagctgctggtcgtaggccttgtcgtgctcgagggccgctgcgtccgccgcgttgacgggctcccccttgtcgagtccgttgaagggtccgaggtactcgtagccaggaagcaccagaccccggccgtcgtcctgcttctgctggttggccttgggcttgggggctccaggtttcaggtcccaccactcgcgaatgccctcagagaggttgtcctcgagccaatctggaagataaccgtcagcagccatacctggtttaagtcatttattgctcagaaacacagtcatccaagtccacgttgacgagatcgcaggccgaacacgcaatctcgggtgcccgccccagcagatgatgaatcgcgcacagtttctgatacgtcttttttctgacgacgggttgagattctgacgcgccggggaagcactctgagcagtctctgaccccgtgcgtgaagcagacgttgaaattctgattcattctctcgcatgtcttgcagggaaacagcatctgaagcatgcccgcgtgacgagaacatttgttttggtacctgtccgcaaggtccaccggtgcttccgcgtctgacgtcgatggctccgcaactgaggggcaggcccgcttgggctcgcttatatccgcgtcactgggggcgggtcttttggtggctccgccctttctgacgtagaactcatgcgccacctcagtcacgtgatcctgagcccagcggaagaactctttgacttcctgcttggtcaccttgccaaagtcgtgctccagacggcgggtgagctcgaacttgaacatgcggtcctgcagcggctgctggtgctcgaaggtggtgctgttcccgtcgatcacggcgcacatgttggtgttggaggtgacgatcacgggcgtggggtcgatctgggccgatgacttgcacttttggtccacgcgcaccttgcttccgcccagaatggccttggcggactccacgaccttggcggtcatcttgccctcctcccaccagatcaccatcttgtcgacgcaatcgttgaagggaaagttctcattggtccagttgacgcagcaagggcgaattc

SEQ ID NO: 2815 - protein, 729 aa, Artificial Sequence
  Synthetic polypeptide
MAADGYLPDWLEDNLSEGIREWWDLKPGAPKPKANQQKQDDGRGLVLPGYKYLGPFNGLDKGEPVNAADAAALEHDKAYDQQLKAGDNPYLRYNHADAEFQERLQEDTSFGGNLGRAVFQAKKRVLEPLGLVEEGAKTAPGKKRPIDSPDSSTGIGKKGQQPAKKKLNFGQTGDSESVPDPQPLGEPPAAPSSVGSGTMAAGGGAPMADNNEGADGVGNASGNWHCDSTWLGDRVITTSTRTWALPTYNNHLYKQISSSSSGATNDNHYFGYSTPWGYFDFNRFHCHFSPRDWQRLINNNWGFRPKKLRFKLFNIQVKEVTTNDGVTTIANNLTSTVQVFSDSEYQLPYVLGSAHQGCLPPFPADVFMIPQYGYLTLNNGSQSVGRSSFYCLEYFPSQMLRTGNNFEFSYSFEDVPFHSSYAHSQSLDRLMNPLIDQYLYYLARTQSTTGSTRELQFHQAGPNTMAEQSKNWLPGPCYRQQGLSKNLDFNNNSNFAWTAATKYHLNGRNSLTNPGIPMATNKDDEDQFFPINGVLVFGKTGAANKTTLENVLMTSEEEIKTTNPVATEEYGVVSSNLQPSTAGPQSQTINSQGALPGMVWQNRDVYLQGPIWAKIPHTDGNFHPSPLMGGFGLKHPPPQILIKNTPVPANPPEVFTPAKFASFITQYSTGQVSVEIEWELQKENSKRWNPEIQYTSNYAKSNNVEFAVNPDGVYTEPRPIGTRYLPRNL

SEQ ID NO: 2816 - DNA, 3094 bp, Artificial Sequence
  Synthetic polynucleotide
gaattcgcccttgctgcgtcaactggaccaagagaactttcccttcaacgattgcgtcgacaagatggtgatctggtgggaggagggcaagatgacggccaaggtcgtggagtccgccaaagccattctgggcggaagcaaggtgcgcgtcgaccaaaagtgcaagtcctcggcccagatcgatcccacccccgtgatcgtcacctccaacaccaacatgtgcgccgtgatcgacgggaacagcaccaccttcgagcaccagcagccgttgcaggaccggatgttcaaatttgaactcacccgccgtctggaacacgactttggcaaggtgaccaagcaggaagtcaaagagttcttccgctgggctagtgatcacgtgactgaggtgacgcatgagttctacgtcagaaagggcggagccagcaaaagacccgcccccgatgacgcggatataagcgagcccaagcgggcctgtccctcagtcacggacccatcgacgtcagacgcggaaggagctccggtggactttgccgacaggtaccaaaacaaatgttctcgtcacgcgggcatgcttcagatgctgtttccctgcaaaacgtgcgagagaatgaatcagaatttcaacatttgcttcacgcacggggtcagagactgtttagaatgtttccccggcgtgtcagaatctcaaccggtcgtcagaaaaaagacgtatcggaagctgtgtgcgattcatcatctgctggggcgggcacccgagattgcttgctcggcctgcgacctggtcaacgtggacctggacgactgtgtttctgagcaataaatgacttaaaccgggtatggctgccgatggttatcttccagattggctcgaggacaacctctctgagggcattcgcgagtggtgggacctgaaacctggagccccgaaacccaaagccaaccagcaaaagcaggacgacggccggggtctggtgcttcctggctacaagtacctcggacccttcaacggactcgacaagggggagcccgtcaacgcggcggacgcagcggccctcgagcacgacaaggcctacgaccagcagctcaaagcgggtgacaatccgtacctgcggtataaccacgccgacgccgagtttcaggagcgtctgcaagaagatacgtcatttgggggcaacctcgggcgagcagtcttccaggccaagaagcgggttctcgaacctctcggtctggttgaggaaggcgctaagacggctcctggaaagaagagacccatagactctccagactcctccacgggcatcggcaaaaaaggccagcagcccgctaaaaagaagctcaattttggtcagactggcgactcagagtcagtccccgaccctcaacctcttggagaacctccagcagcgccctctagtgtgggatctggtacaatggctgcaggcggtggcgcaccaatggcagacaataacgaaggtgccgacggagtgggtaatgcctcaggaaattggcattgcgattccacatggctgggcgacagagtcatcaccaccagcaccagaacctgggccctccccacctacaacaaccacctctacaagcaaatctccagcagcagctcaggagccaccaatgacaaccactacttcggctacagcaccccctgggggtattttgactttaacagattccactgccacttctcaccacgtgactggcagcgactcatcaacaacaactggggattccggcccaagaagctgcggttcaagctcttcaacatccaggtcaaggaggtcacaacgaatgacggcgtcacgaccatcgctaataaccttaccagcacggttcaggtcttctcggactcggaataccagctgccgtacgtcctcggctctgcgcaccagggctgcctgcctccgttcccggcggacgtcttcatgattcctcagtacggctacctgactctgaacaacggcagccaatcggtgggccgttcctccttctactgcctggaatatttcccctctcaaatgctgagaacgggcaacaactttgagttcagttacagcttcgaggacgtgcctttccacagcagctacgcgcacagccagagcctagaccggctgatgaaccctctcatcgaccagtacctgtactacctggcccggacccagagcaccacgggttccaccagggaactgcaatttcatcaagctgggcccaatactatggccgagcagtcaaagaactggctgcctggaccctgctataggcaacagggactgtcaaagaacttggactttaacaacaacagcaattttgcctggactgctgccactaaatatcatctgaatggcagaaactctttgaccaatcctggcattcccatggcaaccaacaaggatgatgaggaccagttctttcccatcaacggggtactggtttttggcaagacgggagctgccaacaaaactacgctggaaaacgttctgatgaccagcgaggaggagatcaagaccactaaccctgtggctacagaagaatacggtgtggtctccagcaacctgcagccgtctacagccgggcctcaatcacagactatcaacagccagggagcactgcctggcatggtctggcagaaccgggacgtgtatctgcagggtcccatctgggccaaaattcctcacacggatggcaactttcacccgtctcctctgatgggcggttttggactcaaacacccgcctccacagatcctgatcaaaaacacacctgtacctgctaatcctccggaggtgtttactcctgccaagtttgcctccttcatcacgcagtacagcaccggacaagtcagcgtggaaatcgagtgggagctgcagaaagaaaacagcaagcgctggaacccagaaattcagtatacttccaattatgccaagtctaataatgttgaatttgctgtgaaccctgatggtgtttatactgagcctcgccccattggcactcgttacctcccccgtaatctgtaattgcttgttaatcaataaaccggttgattcgtttcagttgaactttggtctctgcgaagggcgaattc

SEQ ID NO: 2817 - protein, 1458 aa, Artificial Sequence
  Synthetic polypeptide
MAADGYLPDWLEDNLSEGIREWWDLKPGAPKPKANQQKQDDGRGLVLPGYKYLGPFNGLDKGEPVNAADAAALEHDKAYDQQLKAGDNPYLRYNHADAEFQERLQEDTSFGGNLGRAVFQAKKRVLEPLGLVEEGAKTAPGKKRPIDSPDSSTGIGKKGQQPAKKKLNFGQTGDSESVPDPQPLGEPPAAPSSVGSGTMAAGGGAPTADNNEGADGVGNASGNWHCDSTWLGDRVITTSTRTWALPTYNNHLYKQISSSSSGATNDNHYFGYSTPWGYFDFNRFHCHFSPRDWQRLINNNWGFRPKKLRFKLFNIQVKEVTTNDGVTTIANNLTSTVQVFSDSEYQLPYVLGSAHQGCLPPFPADVFMIPQYGYLTLNNGSQSVGRSSFYCLEYFPSQMLRTGNNFEFSYSFEDVPFHSSYAHSQSLDRLMNPLIDQYLYYLARTQSTTGSTRELQFHQAGPNTMAEQSKNWLPGPCYRQQRLSKNLDFNNNSNFAWTAATKYHLNGRNSLTNPGIPMATNKDDEDQFFPINGVLVFGKTGAANKTTLENVLMTSEEEIKTTNPVATEEYGVVSSNLQSSTAGPQSQTINSQGALPGMVWQNRDVYLQGPIWAKIPHTDGNFHPSPLMGGFGLEHPPPQILIKNTPVPANPPEVFTPAKFASFITQYSTGQVSVEIEWELQKENSKRWNPEIQYTSNYAKSNNVEFAVNPDGVYTEPRPIGTRYLTRNLMAADGYLPDWLEDNLSEGIREWWDLKPGAPKPKANQQKQDDGRGLVLPGYKYLGPFNGLDKGEPVNAADAAALEHDKAYDQQLKAGDNPYLRYNHADAEFQERLQEDTSFGGNLGRAVFQAKKRVLEPLGLVEEGAKTAPGKKRPIGSPDSSTGIGKKGQQPAKKKLNFGQTGDSESVPDPQPLGEPPAAPSSVGSGTMAAGGGAPMADNNEGADGVGNASGNWHCDSTWLGDRVITTSTRTWALPTYNNHLYKQISSSSSGATNDNHYFGYSTPWGYFDFNRFHCHFSPRDWQRLINNNWGFRPKKLRFKLLNIQVKEVTTNDGVTTIANNLTSTVQVFSDSEYQLPYVLGSAHQGCLPPFPADVFMIPQYGYLTLDNGSQSVGRSSFYCLEYFPSQMLRTGNNFEFSYSFEDVPFHSSYAHSQSLDRLMNPLIDQYLYYLARTQSTTGSTRELQFHQAGPNTMAEQSKNWLPGPCYRQQRLSKNLDFNNNSNFAWTAATKYHLNGRNSLTNPGIPMATNKDDEDQFFPINGVLVFGKTGAANKTTLENVLMTSEEEIKTTNPVATEEYGVVSSNLQSSTAGPQSQTINSQGALPGMVWQNRDVYLQGPIWAKIPHTDGNFHPSPLMGGFGLKHPPPQILIKNTPVPANPPEVFTPAKFASFITQYSTGQVSVEIEWELQKENSKRWNPEIQYTSNYAKSNNVEFAVNPDGVYTEPRPIGTRYLTRNL

SEQ ID NO: 2818 - DNA, 3095 bp, Artificial Sequence
  Synthetic polynucleotide
gaattcgcccttcgcagagaccaaagttcaactgaaacgaatcaaccggtttattgattaacaagcaattacagattacgggtgaggtaacgagtgccaatggggcgaggctcagtataaacaccatcagggttcacagcaaattcaacattattagacttggcataattggaagtatactgaatttctgggttccagcgcttgctgttttctttctgcagctcccactcgatttccacgctgacttgtccggtgctgtactgcgtgatgaaggaggcaaacttggcaggagtaaacacctccggaggattagcaggtacaggtgtgtttttgatcaggatctgtggaggcgggtgtttgagtccaaaaccgcccatcagaggagacgggtgaaagttgccatccgtgtgaggaattttggcccagatgggaccctgcagatacacgtcccggttctgccagaccatgccaggcagtgctccctggctgttgatagtctgtgattgaggcccggctgtagacgactgcaggttgctggagaccacaccgtattcttctgtagccacagggttagtggtcttgatctcctcctcgctggtcatcagaacgttttccagcgtagttttgttggcagctcccgtcttgccaaaaaccagtaccccgttgatgggaaagaactggtcctcatcatccttgttggttgccatgggaatgccaggattggtcaaagagtttctgccattcagatgatatttagtggcagcagtccaggcaaaattgctgttgttgttaaagtccaagttctttgacagtctctgttgcctatagcagggtccaggcagccagttctttgactgctcggccatagtattgggcccagcttgatgaaattgcagttccctggtggaacccgtggtgctctgggtccgggccaggtagtacaggtactggtcgatgagagggttcatcagccggtctaggctctggctgtgcgcgtagctgctgtggaaaggcacgtcctcgaagctgtaactgaactcaaagttgttgcccgttctcagcatttgagaggggaaatattccaggcagtagaaggaggaacggcccaccgattggctgccgttgtccagagtcaggtagccgtactgaggaatcatgaagacgtccgccgggaacggaggcaggcagccctggtgcgcagagccgaggacgtacggcagctggtattccgagtccgagaagacctgaaccgtgctggtaaggttattagcgatggtcgtgacgccgtcattcgttgtgacctccttgacctggatgttgaggagcttgaaccgcagcttcttgggccggaatccccagttgttgttgatgagtcgctgccagtcacgtggtgagaagtggcagtggaatctgttaaagtcaaaatacccccagggggtgctgtagccgaagtagtggttgtcattggtggctcctgagctgctgctggagatttgcttgtagaggtggttgttgtaggtggggagggcccaggttctggtgctggtggtgatgactctgtcgcccagccatgtggaatcgcaatgccaatttcctgaggcattacccactccgtcggcaccttcgttattgtctgccattggtgcgccaccgcctgcagccattgtaccagatcccacactagagggcgctgctggaggttctccaagaggttgagggtcggggactgactctgagtcgccagtctgaccaaaattgagcttctttttagcgggctgctggccttttttgccgatgcccgtggaggagtctggagagcctatgggtctcttctttccaggagccgtcttagcgccttcctcaaccagaccgagaggttcgagaacccgcttcttggcctggaagactgctcgcccgaggttgcccccaaatgacgtatcttcttgcagacgctcctgaaactcggcgtcggcgtggttataccgcaggtacggattgtcacccgctttgagctgctggtcgtaggccttgtcgtgctcgagggccgctgcgtccgccgcgttgacgggctcccccttgtcgagtccgttgaagggtccgaggtacttgtagccaggaagcaccagaccccggccgtcgtcctgcttttgctggttggctttgggtttcggggctccaggtttcaggtcccaccactcgcgaatgccctcagagaggttgtcctcgagccaatctggaagataaccatcggcagccatacctggtttaagtcatttattgctcagaaacacagtcgtccaggtccacgttgaccaggtcgcaggccgagcaagcaatctcgggtgcccgccccagcagatgatgaatcgcacacagcttccgatacgtcttttttctgacgaccggttgagattctgacacgccggggaaacattctaaacagtctctgaccccgtgcgtgaagcaaatgttgaaattctgattcattctctcgcacgttttgcagggaaacagcacctgaagcatgcccgcgtgacgagaacatttgttttggtacctgtcggcaaagtccaccggagctccttccgcgtctgacgtcgatgggtccgtgactgagggacgggcccgcttgggctcgcttatatccgcgtcatcgggggcgggtcttttgctggctccgccctttctgacgtagaactcatgcgtcacctcagtcacgtgatcactagcccagcggaagaactctttgacttcctgctttgtcaccttgccaaagtcgtgttccagacggcgggtgagttcaaatttgaacatccggtcctgcaacggttgctggtgctcgaaggtggtgctgttcccgtcgatcacggcgcacatgttggtgttggaggtgacgatcacgggggtgggatcgatctgggcggacgacttgcacttttggtccacgcgcaccttgctgccgccgagaatggccttggcggactccacgaccttggccgtcatcttgccctcctcccaccagatcaccatcttgtcgacgcaatcgttgaagggaaagttctcattggtccagttgacgcagcaagggcgaattc

SEQ ID NO: 2819 - DNA, 3095 bp, Artificial Sequence
  Synthetic polynucleotide
gaattcgcccttcgcagagaccaaagttcaactgaaacgaatcaaccggtttattgattaacaagcaattacagattacgggtgaggtaacgagtgccaatggggcgaggctcagtataaacaccatcagggttcacagcaaattcaacattattagacttggcataattggaagtatactgaatttctgggttccagcgcttgctgttttctttctgcagctcccactcgatttccacgctgacttgtccggtgctgtactgcgtgatgaaggaggcaaacttggcaggagtaaacacctccggaggattagcaggtacaggtgtgtttttgatcaggatctgtggaggcgggtgttcgagtccaaaaccgcccatcagaggagacgggtgaaagttgccatccgtgtgaggaattttggcccagatgggaccctgcagatacacgtcccggttctgccagaccatgccaggcagtgctccctggctgttgatagtctgtgattgaggcccggctgtagacgactgcaggttgctggagaccacaccgtattcttctgtagccacagggttagtggtcttgatctcctcctcgctggtcatcagaacgttttccagcgtagttttgttggcagctcccgtcttgccaaaaaccagtaccccgttgatgggaaagaactggtcctcatcatccttgttggttgccatgggaatgccaggattggtcaaagagtttctgccattcagatgatatttagtggcagcagtccaggcaaaattgctgttgttgttaaagtccaagttctttgacagtctctgttgcctatagcagggtccaggcagccagttctttgactgctcggccatagtattgggcccagcttgatgaaattgcagttccctggtggaacccgtggtgctctgggtccgggccaggtagtacaggtactggtcgatgagagggttcatcagccggtctaggctctggctgtgcgcgtagctgctgtggaaaggcacgtcctcgaagctgtaactgaactcaaagttgttgcccgttctcagcatttgagaggggaaatattccaggcagtagaaggaggaacggcccaccgattggctgccgttgttcagagtcaggtagccgtactgaggaatcatgaagacgtccgccgggaacggaggcaggcagccctggtgcgcagagccgaggacgtacggcagctggtattccgagtccgagaagacctgaaccgtgctggtaaggttattagcgatggtcgtgacgccgtcattcgttgtgacctccttgacctggatgttgaagagcttgaaccgcagcttcttgggccggaatccccagttgttgttgatgagtcgctgccagtcacgtggtgagaagtggcagtggaatctgttaaagtcaaaatacccccagggggtgctgtagccgaagtagtggttgtcattggtggctcctgagctgctgctggagatttgcttgtagaggtggttgttgtaggtggggagggcccaggttctggtgctggtggtgatgactctgtcgcccagccatgtggaatcgcaatgccaatttcctgaggcattacccactccgtcggcaccttcgttattgtctgccgttggtgcgccaccgcctgcagccattgtaccagatcccacactagagggcgctgctggaggttctccaagaggttgagggtcggggactgactctgagtcgccagtctgaccaaaattgagcttctttttagcgggctgctggccttttttgccgatgcccgtggaggagtctggagagtctatgggtctcttctttccaggagccgtcttagcgccttcctcaaccagaccgagaggttcgagaacccgcttcttggcctggaagactgctcgcccgaggttgcccccaaatgacgtatcttcttgcaggcgctcctgaaactcggcgtcggcgtggttataccgcaggtacggattgtcacccgctttgagctgctggtcgtaggccttgtcgtgctcgagggccgctgcgtccgccgcgttgacgggctcccccttgtcgagtccgttgaagggtccgaggtacttgtagccaggaagcaccagaccccggccgtcgtcctgcttttgctggttggctttgggtttcggggctccaggtttcaggtcccaccactcgcgaatgccctcagagaggttgtcctcgagccaatctggaagataaccatcggcagccatacctggtttaagccatttattgctcagaaacacagtcgtccaggtccacgttgaccaggtcgcaggccgagcaggcaatctcgggtgcccgccccagcagatgatgaatcgcacacagcttccgatacgtcttttttctgacgaccggttgagattctgacacgccggggaaacattctaaacagtctctgaccccgtgcgtgaagcaaatgttgaaattctgattcattctctcgcacgttttgcagggaaacagcatctgaagcatgcccgcgtggcgagaacatttgttttggtacctgtcggcaaagtccaccggagctccttccgcgtctgacgtcgatgggtccgtgactgagggacaggcccgcttgggctcgcttatatccgcgtcatcgggggcgggtcttttgctggctccgccctttctgacgtagaactcatgcgtcacctcagtcacgtgatcactagcccagcggaagaactctttgacttcctgctttgtcaccttgccaaagtcgtgttccagacggcgggtgagttcaaatttgaacatccggtcctgcaacggctgctggtgctcgaaggtggtgctgttcccgtcgatcacggcgcgcatgttggtgttggaggtgacgatcacgggggtgggatcgatctgggcggacgacttgcacttttggtccacgcgcaccttgctgccgccgagaatggccttggcggactccacgaccttggccgtcatcttgccctcctcccaccagatcaccatcttgtcgacgcaatcgttgaagggaaagttctcattggtccagttgacgcagcaagggcgaattc

SEQ ID NO: 2820 - protein, 729 aa, Artificial Sequence; identical to SEQ ID NO: 2548
  Synthetic polypeptide

SEQ ID NO: 2821 - protein, 729 aa, Artificial Sequence
  Synthetic polypeptide
MAADGYLPDWLEDNLSEGIREWWDLKPGAPKPKANQQKQDDGRGLVLPGYKYLGPFNGLDKGEPVNAADAAALEHDKAYDQQLKAGDNPYLRYNHADAEFQERLQEDTSFGGNLGRAVFQAKKRVLEPLGLVEEGAKTAPGKKRPIDSPDSSTGIGKKGQQPAKKKLNFGQTGDSESVPDPQPLGEPPAAPSSVGSGTMAAGGGAPTADNNEGADGVGNASGNWHCDSTWLGDRVITTSTRTWALPTYNNHLYKQISSSSSGATNDNHYFGYSTPWGYFDFNRFHCHFSPRDWQRLINNNWGFRPKKLRFKLFNIQVKEVTTNDGVTTIANNLTSTVQVFSDSEYQLPYVLGSAHQGCLPPFPADVFMIPQYGYLTLNNGSQSVGRSSFYCLEYFPSQMLRTGNNFEFSYSFEDVPFHSSYAHSQSLDRLMNPLIDQYLYYLARTQSTTGSTRELQFHQAGPNTMAEQSKNWLPGPCYRQQRLSKNLDFNNNSNFAWTAATKYHLNGRNSLTNPGIPMATNKDDEDQFFPINGVLVFGKTGAANKTTLENVLMTSEEEIKTTNPVATEEYGVVSSNLQSSTAGPQSQTINSQGALPGMVWQNRDVYLQGPIWAKIPHTDGNFHPSPLMGGFGLKHPPPQILIKNTPVPANPPEVFTPAKFASFITQYSTGQVSVEIEWELQKENSKRWNPEIQYTSNYAKSNNVEFAVNPDGVYTEPRPIGTRYLTRNL

SEQ ID NO: 2822 - protein, 729 aa, Artificial Sequence
  Synthetic polypeptide
MAADGYLPDWLEDNLSEGIREWWDLKPGAPKPKANQQKQDDGRGLVLPGYKYLGPFNGLDKGEPVNAADAAALEHDKAYDQQLKAGDNPYLRYNHADAEFQERLQEDTSFGGNLGRAVFQAKKRVLEPLGLVEEGAKTAPGKKRPIDSPDSSTGIGKKGQQPAKKKLNFGQTGDSESVPDPQPLGEPPAAPSSVGSGTMAAGGGAPMADNNEGADGVGNASGNWHCDSTWLGDRVITTSTRTWALPTYNNHLYKQISSSSSGATNDNHYFGYSTPWGYFDFNRFHCHFSPRDWQRLINNNWGFRPKKLRFKLFNIQVKEVTTNDGVTTIANNLTSTVQVFSDSEYQLPYVLGSAHQGCLPPFPADVFMIPQYGYLTLNNGSQSVGRSSFYCLEYFPSQMLRTGNNFEFSYSFEDVPFHSSYAHSQSLDRLMNPLIDQYLYYLARTQSTTGSTRELQFHQAGPNTMAEQSKNWLPGPCYRQQRLSKNLDFNNNSNFAWTAATKYHLNGRNSLTNPGIPMATNKDDEDQFFPINGVLVFGKTGAANKTTLENVLMTSEEEIKTTNPVATEEYGVVSSNLQSSTAGPQSQTINSQGALPGMVWQNRDVYLQGPIWAKIPHTDGNFHPSPLMGGFGLKHPPPQILIKNTPVPANPPEVFTPAKFASFITQYSTGQVSVEIEWELQKENSKRWNPEIQYTSNYAKSNNVEFAVNPDGVYTEPRPIGTRYLTRNL

SEQ ID NO: 2823 - DNA, 2217 bp, Artificial Sequence
  Synthetic polynucleotide
atggctgctgacggttatcttccagattggctcgaggacaacctctctgagggcattcgcgagtggtgggacctgaaacctggagcccccaagcccaaggccaaccagcagaagcaggacgacggccggggtctggtgcttcctggctacaagtacctcggacccttcaacggactcgacaagggggagcccgtcaacgcggcggacgcagcggccctcgagcacgacaaggcctacgaccagcagctcaaagcgggtgacaatccgtacctgcggtataaccacgccgacgccgagtttcaggagcgtctacaagaagatacgtcttttgggggcaacctcgggcgagcagtcttccaggccaagaagcgggttctcgaacctctcggtctggttgaggaagctgctaagacggctcctggaaagaagagaccggtagaaccgtcacctcagcgttcccccgactcctccacgggcatcggcaagaaaggccagcggcccgctaaaaagagactgaactttggtcagactggcgactcagagtcagtccccgaccctcaaccaatcggagaaccaccagcaggcccctctggtctgggatctggtacaatggctgcaggcggtggcgctccaatggcagacaataacgaaggcgccgacggagtgggtagttcctcaggaaattggcattgcgattccacatggctgggcgacagagtcatcaccaccagcacccgaacctgggccctgcccacctacaacaaccacctctacaagcaaatatccaatgggacatcgggaggaagcaccaacgacaacacctacttcggctacagcaccccctgggggtattttgacttcaacagattccactgccacttctcaccacgtgactggcagcgactcatcaacaacaactggggattccggccaaaaagactcagcttcaagcccttcaacatccaggtcaaggaggtcacgcagaatgaaggcaccaagaccatcgccaataaccttaccagcacgattcaggtatttacggactcggaataccagctgccgtacgtcctcggctccgcgcaccagggctgcctgcctccgttcccggcggacgtcttcatgattccccagtacggctaccttacactgaacaatggaagtcaagccgtaggccgttcctccttctactgcctggaatattttccatctcaaatgctgcgaactggaaacaattttgaattcagctacaccttcgaggacgtgcctttccacagcagctacgcacacagccagagcttggaccgactgatgaatcctctcatcgaccagtacctgcactacttatccagaactcagtccacaggaggaactcaaggtacccagcaattgttattttctcaagctgggcctgcaaacatgtcggctcaggctaagaactggctacctggaccttgctaccggcagcagcgagtctctacgacactgtcgcaaaacaacaacagcaactttgcttggactggtgccaccaaatatcacctgaacggaagagactctttggtaaatcccggtgtcgccatggcaacccacaaggacgacgaggaacgcttcttcccgtcgagtggagtcctgatgtttggaaaacagggtgctggaagagacaatgtggactacagcagcgttatgctaaccagcgaagaagaaattaaaaccactaaccctgtagccacagaacaatacggtgtggtggctgacaacttgcagcaaaccaatacagggcctattgtgggaaatgtcaacagccaaggagccttacctggcatggtctggcagaaccgagacgtgtacctgcagggtcccatctgggccaagattcctcacacggacggcaacttccacccttcaccgctaatgggaggatttggactgaagcacccacctcctcagatcctgatcaagaacacgccggtacctgcggatcctccaacaacgttcagccaggcgaaattggcttccttcattacgcagtacagcaccggacaggtcagcgtggaaatcgagtgggagctgcagaaggagaacagcaaacgctggaacccagagattcagtacacttcaaactactacaaatctacaaatgtggactttgctgtcaatacagagggaacttattctgagcctcgccccattggtactcgctacctcacccgtaatctgtaa

SEQ ID NO: 2824 - protein, 738 aa, Artificial Sequence
  Synthetic polypeptide
MAADGYLPDWLEDNLSEGIREWWDLKPGAPKPKANQQKQDDGRGLVLPGYKYLGPFNGLDKGEPVNAADAAALEHDKAYDQQLKAGDNPYLRYNHADAEFQERLQEDTSFGGNLGRAVFQAKKRVLEPLGLVEEAAKTAPGKKRPVEPSPQRSPDSSTGIGKKGQRPAKKRLNFGQTGDSESVPDPQPIGEPPAGPSGLGSGTMAAGGGAPMADNNEGADGVGSSSGNWHCDSTWLGDRVITTSTRTWALPTYNNHLYKQISNGTSGGSTNDNTYFGYSTPWGYFDFNRFHCHFSPRDWQRLINNNWGFRPKRLSFKPFNIQVKEVTQNEGTKTIANNLTSTIQVFTDSEYQLPYVLGSAHQGCLPPFPADVFMIPQYGYLTLNNGSQAVGRSSFYCLEYFPSQMLRTGNNFEFSYTFEDVPFHSSYAHSQSLDRLMNPLIDQYLHYLSRTQSTGGTQGTQQLLFSQAGPANMSAQAKNWLPGPCYRQQRVSTTLSQNNNSNFAWTGATKYHLNGRDSLVNPGVAMATHKDDEERFFPSSGVLMFGKQGAGRDNVDYSSVMLTSEEEIKTTNPVATEQYGVVADNLQQTNTGPIVGNVNSQGALPGMVWQNRDVYLQGPIWAKIPHTDGNFHPSPLMGGFGLKHPPPQILIKNTPVPADPPTTFSQAKLASFITQYSTGQVSVEIEWELQKENSKRWNPEIQYTSNYYKSTNVDFAVNTEGTYSEPRPIGTRYLTRNL

SEQ ID NO: 2825 - DNA, 2217 bp, Artificial Sequence
  Synthetic polynucleotide
atggctgctgacggttatcttccagattggctcgaggacaacctctctgagggcattcgcgagtggtgggacctgaaacctggagcccccaagcccaaggccaaccagcagaagcaggacgacggccggggtctggtgcttcctggctacaagtacctcggacccttcaacggactcgacaagggggagcccgtcaacgcggcggacgcagcggccctcgagcacgacaaggcctacgaccagcagctcaaagcgggtgacaatccgtacctgcggtataaccacgccgacgccgagtttcaggagcgtctgcaagaagatacgtcttttgggggcaacctcgggcgagcagtcttccaggccaagaagcgggttctcgaacctctcggtctggttgaggaagctgctaagacggctcctggaaagaagagaccggtagaaccgtcacctcagcgttcccccgactcctccacgggcatcggcaagaaaggccagcagcccgctaaaaagagactgaactttggtcagactggcgactcagagtcagtccccgaccctcaaccaatcggagaaccaccagcaggcccctctggtctgggatctggtacaatggctgcaggcggtggcgctccaatggcagacaataacgaaggcgccgacggagtgggtagttcctcaggaaattggcattgcgattccacatggctgggcgacagagtcatcaccaccagcacccgaacctgggccctgcccacctacaacaaccacctctacaagcaaatatccaatgggacatcgggaggaagcaccaacgacaacacctacttcggctacagcaccccctgggggtattttgacttcaacagattccactgccacttctcaccacgtgactggcagcgactcatcaacaacaactggggattccggccaaaaagactcagcttcaagctcttcaacatccaggtcaaggaggtcacgcagaatgaaggcaccaagaccatcgccaataaccttaccagcacgattcaggtatttacggactcggaataccagctgccgtacgtcctcggctccgcgcaccagggctgcctgcctccgttcccggcggacgtcttcatgattccccagtacggctaccttacactgaacaatggaagtcaagccgtaggccgttcctccttctactgcctggaatattttccatctcaaatgctgcgaactggaaacaattttgaattcagctacaccttcgaggacgtgcctttccacagcagctacgcacacagccagagcttggaccgactgatgaatcctctcatcgaccagtacctgtactacttatccagaactcagtccacaggaggaactcaaggtacccagcaattgttattttctcaagctgggcctgcaaacatgtcggctcaggctaagaactggctacctggaccttgctaccggcagcagcgagtctctacgacactgtcgcaaaacaacaacagcaactttgcttggactggtgccaccaaatatcacctgaacggaagagactctttggtaaatcccggtgtcgccatggcaacccacaaggacgacgaggaacgcttcttcccgtcgagtggagtcctgatgtttggaaaacagggtgctggaagagacaatgtggactacagcagcgttatgctaaccagcgaagaagaaattaaaaccactaaccctgtagccacagaacaatacggtgtggtggctgataacttgcagcaaaccaatacggggcctattgtgggaaatgtcaacagccaaggagccttacctggcatggtctggcagaaccgagacgtgtacctgcagggtcccatctgggccaagattcctcacacggacggcaacttccacccttcaccgctaatgggaggatttggactgaagcacccacctcctcagatcctgatcaagaacacgccggtacctgcggatcctccaacaacgttcagccaggcgaaattggcttccttcattacgcagtacagcaccggacaggtcagcgtggaaatcgagtgggagctgcagaaggagaacagcaaacgctggaacccagagattcagtacacttcaaactactacaaatctacaaatgtggactttgctgtcaatacagagggaacttattctgagcctcgccccattggtactcgttacctcacccgtaatctgtaa

SEQ ID NO: 2826 - protein, 738 aa, Artificial Sequence; identical to SEQ ID NO: 2478
  Synthetic polypeptide

SEQ ID NO: 2827 - protein, 738 aa, Artificial Sequence
  Synthetic polypeptide
MAADGYLPDWLEDNLSEGIREWWDLKPGAPKPKANQQKQDDGRGLVLPGYKYLGPFNGLDKGEPVNAADAAALEHDKAYDQQLKAGDNPYLRYNHADAEFQERLQEDTSFGGNLGRAVFQAKKRVLEPLGLVEEAAKTAPGKKRPVEPSPQRSPDSSTGIGKKGQQPAKKRLNFGQTGDSESVPDPQPIGEPPAGPSGLGSGTMAAGGGAPMADNNEGADGVGSSSGNWHCDSTWLGDRVITTSTRTWALPTYNNHLYKQISNGTSGGSTNDNTYFGYSTPWGYFDFNRFHCHFSPRDWQRLINNNWGFRPKRLSFKLFNIQVKEVTQDEGTKTIANNLTSTIQVFTDSEYQLPYVLGSAHQGCLPPFPADVFMIPQYGYLTLNNGSQAVGRSSFYCLEYFPSQMLRTGNNFEFSYTFEDVPFHSSYAHSQSLDRLMNPLIDQYLYYLSRTQSTGGTQGTQQLLFSQAGPANMSARAKNWLPGPCYRQQRVSTTLSQNNNSNFAWTGATKYHLNGRDSLVNPGVAMATHKDDEERFFPSSGVLMFGKQGAGRDNVDYSSVMLTSEEEIKTTNPVATEQYGVVADNLQQANTGPIVGNVNSQGALPGMVWQNRDVYLQGPIWAKIPHTDGNFHPSPLMGGFGLKHPPPQILIKNTPVPADPPTTFSQAKLASFITQYSTGQVSVEIEWELQKENSKRWNPEIQYTSNYYKSTNVDFAVNSEGTYSEPRPIGTRYLTRNL

SEQ ID NO: 2828 - DNA, 2217 bp, Artificial Sequence
  Synthetic polynucleotide
atggctgctgacggttatcttccagattggctcgaggacaacctctctgagggcattcgcgagtggtgggacctgaaacctggagcccccaagcccaaggccaaccagcagaagcaggacgacggccggggtctggtgcttcctggctacaagtacctcggacccttcaacggactcgacaagggggagcccgtcaacgcggcggacgcagcggccctcgagcacgacaaggcctacgaccagcagctcaaagcgggtgacaatccgtacctgcggtataaccacgccgacgccgagtttcaggagcgtctgcaagaagatacgtcttttgggggcaacctcgggcgagcagtcttccaggccaagaagcgggttctcgaacctctcggtctggttgaggaagctgctaagacggctcctggaaagaagagaccggtagaaccgtcacctcagcgttcccccgactcctccacgggcatcggcaagaaaggccagcagcccgctaaaaagagactgaactttggtcagactggcgactcagagtcagtccccgaccctcaaccaatcggagaaccaccagcaggcccctctggtctgggatctggtacaatggctgcaggcggtggcgctccaatggcagacaataacgaaggcgccgacggagtgggtagttcctcaggaaattggcattgcgattccacatggctgggcgacagagtcatcaccaccagcacccgaacctgggccctgcccacctacaacaaccacctctacaagcaaatatccaatgggacatcgggaggaagcaccaacgacaacacctacttcggctacagcaccccctgggggtattttgacttcaacagattccactgccacttctcaccacgtgactggcagcgactcatcaacaacaactggggattccggccaaaaagactcagcttcaagctcttcaacatccaggtcaaggaggtcacgcaggatgaaggcaccaagaccatcgccaataaccttaccagcacgattcaggtatttacggactcggaataccagctgccgtacgtcctcggctccgcgcaccagggctgcctgcctccgttcccggcggacgtcttcatgattccccagtacggctaccttacactgaacaatggaagtcaagccgtaggccgttcctccttctactgcctggaatattttccatctcaaatgctgcgaactggaaacaattttgaattcagctacaccttcgaggacgtgcctttccacagcagctacgcacacagccagagcttggaccgactgatgaatcctctcatcgaccagtacctgtactacttatccagaactcagtccacaggaggaactcaaggtacccagcaattgttattttctcaagctgggcctgcaaacatgtcggctcgggctaagaactggctacctggaccttgctaccggcagcagcgagtctctacgacactgtcgcaaaacaacaacagcaactttgcttggactggtgccaccaaatatcacctgaacggaagagactctttggtaaatcccggtgttgctatggcaacgcataaggacgacgaggaacgtttctttccatcgagcggagtcctgatgtttggaaaacagggtgctggaagagacaatgtggactatagcagcgttatgctaaccagcgaggaagaaattaaaaccactaaccctgtagccacagaacaatacggtgtggtggctgacaacttgcagcaagccaatacagggcctattgtgggaaatgtcaacagccaaggagccttacctggcatggtctggcagaaccgagacgtgtacctgcagggtcccatctgggccaaaattcctcacacggacggcaattttcacccgtctcctctgatgggcggctttggactgaagcacccacctccccagatcctgatcaagaatacgccggtacctgcggatcctccaacgacgttcagccaggcaaaattggcttccttcatcacgcagtacagcaccggccaggtcagcgtggagatcgagtgggagctgcagaaggagaacagcaagcgatggaacccagaaattcagtacacttccaactactacaaatctacaaatgtggactttgctgtcaattctgagggtacatattcagagcctcgccccattggtactcgttatctgacacgtaatctgtaa

SEQ ID NO: 2829 - DNA, 2211 bp, Artificial Sequence
  Synthetic polynucleotide
atggctgccgatggttatcttccagattggctcgaggacaacctctctgagggcattcgcgagtggtgggacttgaaacctggagccccgaaacccaaagccaaccagcaaaagcaggacgacggccggggcctggtgcttcctggctacaagtacctcggacccttcaacggactcgacaagggggagcccgtcaacgcggcggacgcagcggccctcgagcacgacaaggcctacgaccagcagctcgaagcgggtgacaatccgtacctgcggtataaccacgccgacgccgagtttcaggagcgtctgcaagaagatacgtcttttgggggcaacctcgggcgagcagtcttccaggccaagaagcgggttctcgaacctctcggtctggttgaggaaggcgctaagacggctcctggaaagaagagaccagtagagcagtcaccccaagaaccagactcctcctcgggcatcggcaagaaaggccaacagcccgccagaaaaagactcaattttggccagactggcgactcagagtcagttccagaccctcaacctctcggagaacctccagcagcgccctctggtgtgggacctaatacaatggctgcaggcggtggcgcaccaatggcagacaataacgaaggcgccgacggagtgggtagttcctcgggaaattggcattgcgattccacatggctgggcgacagagtcatcaccaccagcacccgaacctgggccctgcccacctacaacaaccacctctacaagcaaatctccaacgggacatcgggaggagccaccaacgacaacacctacttcggctacagcaccccctgggggtattttgactttaacagattccactgccacttttcaccacgtgactggcagcgactcatcaacaacaactggggattccggcccaagagactcagcttcaagctcttcaacatccaggtcaaggaggtcacgcagaatgaaggcaccaagaccatcgccaataacctcaccagcaccatccaggtgtttacggactcggagtaccagctgccgtacgttctcggctctgcccaccagggctgcctgcctccgttcccggcggacgtgttcatgattccccagtacggctacctaacactcaacaacggtagtcaggccgtgggacgctcctccttctactgcctggaatactttccttcgcagatgctgagaaccggcaacaacttccagtttacttacaccttcgaggacgtgcctttccacagcagctacgcccacagccagagcttggaccggctgatgaatcctctgattgaccagtacctgtactacttgtctcggactcaaacaacaggaggcacggcaaatacgcagactctgggcttcagccaaggtgggcctaatacaatggccaatcaggcaaagaactggctgccaggaccctgttaccgccaacaacgcgtctcaacgacaaccgggcaaaacaacaatagcaactttgcctggactgctgggaccaaataccatctgaatggaagaaattcattggctaatcctggcatcgctatggcaacacacaaagacgacgaggagcgttttttcccagtaacgggatcctgtttttggcaacaaaatgctgccagagacaatgcggattacagcgatgtcatgctcaccagcgaggaagaaatcaaaaccactaaccctgtggctacagaggaatacggtatcgtggcagataacttgcagcagcaaaacacggctcctcaaattggaactgtcaacagccagggggccttacccggtatggtctggcagaaccgggacgtgtacctgcagggtcccatctgggccaagattcctcacacggacggcaacttccacccgtctccgctgatgggcggctttggcctgaaacatcctccgcctcagatcctgatcaagaacacgcctgtacctgcggatcctccgaccaccttcaaccagtcaaagctgaactctttcatcacgcaatacagcaccggacaggtcagcgtggaaattgaatgggagctacagaaggaaaacagcaagcgctggaaccccgagatccagtacacctccaactactacaaatctacaagtgtggactttgctgttaatacagaaggcgtgtactctgaaccccgccccattggcacccgttacctcacccgtaatctgtaa

SEQ ID NO: 2830 - protein, 736 aa, Artificial Sequence
  Synthetic polypeptide
MAADGYLPDWLEDNLSEGIREWWDLKPGAPKPKANQQKQDDGRGLVLPGYKYLGPFNGLDKGEPVNAADAAALEHDKAYDQQLEAGDNPYLRYNHADAEFQERLQEDTSFGGNLGRAVFQAKKRVLEPLGLVEEGAKTAPGKKRPVEQSPQEPDSSSGIGKKGQQPARKRLNFGQTGDSESVPDPQPLGEPPAAPSGVGPNTMAAGGGAPMADNNEGADGVGSSSGNWHCDSTWLGDRVITTSTRTWALPTYNNHLYKQISNGTSGGATNDNTYFGYSTPWGYFDFNRFHCHFSPRDWQRLINNNWGFRPKRLSFKLFNIQVKEVTQNEGTKTIANNLTSTIQVFTDSEYQLPYVLGSAHQGCLPPFPADVFMIPQYGYLTLNNGSQAVGRSSFYCLEYFPSQMLRTGNNFQFTYTFEDVPFHSSYAHSQSLDRLMNPLIDQYLYYLSRTQTTGGTANTQTLGFSQGGPNTMANQAKNWLPGPCYRQQRVSTTTGQNNNSNFAWTAGTKYHLNGRNSLANPGIAMATHKDDEERFFPVTGSCFWQQNAARDNADYSDVMLTSEEEIKTTNPVATEEYGIVADNLQQQNTAPQIGTVNSQGALPGMVWQNRDVYLQGPIWAKIPHTDGNFHPSPLMGGFGLKHPPPQILIKNTPVPADPPTTFNQSKLNSFITQYSTGQVSVEIEWELQKENSKRWNPEIQYTSNYYKSTSVDFAVNTEGVYSEPRPIGTRYLTRNL

SEQ ID NO: 2831 - DNA, 2214 bp, Artificial Sequence
  Synthetic polynucleotide
atggctgctgacggttatcttccagattggctcgaggacaacctctctgagggcattcgcgagtggtgggacctgaaacctggagcccccaagcccaaggccaaccagcagaagcaggacgacggccggggtctggtgcttcctggctacaagtacctcggacccttcaacggactcgacaagggggagcccgtcagcgcggcggacgcagcggccctcgagcacgacaaggcctgcgaccagcggctcaaagcgggtgacaatccgtacctgcggtataaccacgccgacgccgagtttcaggagcgtctgcaagaagatacgtcttttgggggcaacctcgggcgagcagtcttccaggccaagaagcgggttctcgaacctctcggtctggttgaggaagctgctaagacggctcctggaaagaagggaccggtagaaccgtcacctcagcgttcccccgactcctccacgggcatcggcaagaaaggccagcagcccgctagaaagagactgaactttgggcagactggcgactcagagtcagtccccgaccctcaaccaatcggagaaccaccagcaggcccctctggtctgggatctggtacaatggctgcaggcggtggcgcaccaatggctgacaataacgagggcgccgacggagtgggtaatgcctcaggaaattggcattgcgattccacatggctgggcgacagagtcatcaccaccagcacccgaacctgggctttgcccacctacaacaatcacctctacaagcaaatctccagtcagtcagcaggtagcaccaacgacaacgtctacttcggctacagcaccccctgggggtattttgacttcaacagattccactgtcacttctcaccacgtgactggcagcggctcatcaacaacaactggggattccggcccaagaagctcaacttcaagctgttcaacatccaggtcaaggaggtcacaacgaatgacggcgtcacgaccatcgccaataaccttaccagcacggttcaggtcttttcggactcggaataccagctgccctacgtcctcggctccgcacaccagggctgcctgcctccgttcccggcggacgtcttcatgattccccagtacggctacctgactctgaacaatggcagccaatcggtgggtcgttcctctttctactgcctggaatatttcccttctcaaatgctgagaacgggcaacaacttcaccttcagctacaccttcgaggacgttcccttccacagcagctacgcacacagccagagcctggaccggctgatgaatcctcttatcgaccagtacctgtattacctggccagaacacagagcaacgcaggaggcacagctggcaatcgggaactgcagttttatcagggcgggcctaccaccatggccgaacaagccaaaaactggctgcctggaccttgcttccggcaacaaagagtctccaagacgctggatcaaaacaacaacagcaactttgcttggactggtgccaccaaataccatctaaatggaagaaattcattggttaatcccggtgtcgccatggcaacccacaaggacgacgaggaacgcttcttcccttcgagcggagtcctgatttttggaaaaactggagcagctaataagactacactggaaaatgtgttaatgacaaatgaagaggaaattcgtcctaccaacccggtagccaccgaggaatacgggactgttagcagcaacctgcaggcggctaacactgcagcccagacacaagttgtcaacaaccagggagccttacctggtatggtctggcagaaccgggacgtgtacctgcagggtcccatctgggccaagattcctcacacggacggcaactttcacccgtctccgctgatgggcggctttggactgaagcatccgcctcctcagatcctgatcaaaaacactcctgttcctgctaatcccccggaggtgtttacgcctgccaagtttgcttctttcatcacacagtacagcaccggccaggtcagcgtggagatcgagtgggagctgcagaaggagaacagcaagcgctggaacccagagattcagtatacctccaattttgacgaacagactggtgtggactttgccgttgacagccagggtgtttattctgagcctcgccccattggtactcgttacctcacccgtaatctgtaa

SEQ ID NO: 2832 - protein, 737 aa, Artificial Sequence
  Synthetic polypeptide
MAADGYLPDWLEDNLSEGIREWWDLKPGAPKPKANQQKQDDGRGLVLPGYKYLGPFNGLDKGEPVSAADAAALEHDKACDQRLKAGDNPYLRYNHADAEFQERLQEDTSFGGNLGRAVFQAKKRVLEPLGLVEEAAKTAPGKKGPVEPSPQRSPDSSTGIGKKGQQPARKRLNFGQTGDSESVPDPQPIGEPPAGPSGLGSGTMAAGGGAPMADNNEGADGVGNASGNWHCDSTWLGDRVITTSTRTWALPTYNNHLYKQISSQSAGSTNDNVYFGYSTPWGYFDFNRFHCHFSPRDWQRLINNNWGFRPKKLNFKLFNIQVKEVTTNDGVTTIANNLTSTVQVFSDSEYQLPYVLGSAHQGCLPPFPADVFMIPQYGYLTLNNGSQSVGRSSFYCLEYFPSQMLRTGNNFTFSYTFEDVPFHSSYAHSQSLDRLMNPLIDQYLYYLARTQSNAGGTAGNRELQFYQGGPTTMAEQAKNWLPGPCFRQQRVSKTLDQNNNSNFAWTGATKYHLNGRNSLVNPGVAMATHKDDEERFFPSSGVLIFGKTGAANKTTLENVLMTNEEEIRPTNPVATEEYGTVSSNLQAANTAAQTQVVNNQGALPGMVWQNRDVYLQGPIWAKIPHTDGNFHPSPLMGGFGLKHPPPQILIKNTPVPANPPEVFTPAKFASFITQYSTGQVSVEIEWELQKENSKRWNPEIQYTSNFDEQTGVDFAVDSQGVYSEPRPIGTRYLTRNL

SEQ ID NO: 2833 - DNA, 2214 bp, Artificial Sequence
  Synthetic polynucleotide
atggctgccgatggttatcttccagattggctcgaggacaacctctctgagggcattcgcgagtggtgggacctgaaacctggagccccgaaacccaaagccaaccagcaaaagcaggacgacggccggggtctggtgcttcctggctacaagtacctcggacccttcaacggactcgacaagggggagcccgtcaacgcggcggacgcagcggccctcgagcacgacaaggcctacgaccagcagctcaaagcgggtgacaatccgtacctgcggtataaccacgccgacgccgagtttcaggagcgtctgcaagaagatacgtcttttgggggcaacctcgggcgagcagtcttccaggccaagaagcgggttctcgaacctctcggtctggttgaggaagctgctaagacggctcctggaaagaagagaccggtagaaccgtcacctcagcgttcccccgactcctccacgggcatcggcaagaaaggccagcagcccgctagaaagagactgaactttgggcagactggcgactcagagtcagtccccgaccctcaaccaatcggagaaccaccagcaggcccctctggtctgggatctggtacaatggctgcaggcggtggcgctccaatggcagacaataacgaaggcgccgacggagtgggtaatgcctcaggaaattggcattgcgattccacatggctgggcgacagagtcatcaccaccagcacccgaacctgggctttgcccacctacaacaaccacctctacaagcaaatctccagtcagtcagcaggtagcaccaacgacaacgtctacttcggctacagcaccccctgggggtattttgacttcaacagattccactgtcacttctcaccacgtgactggcagcggctcatcaacaacaactggggattccggcccaagaagctcaacttcaagctgttcaacatccaggtcaaggaggtcacaacgaatgacggcgtcacgaccatcgccaataaccttaccagcacggttcaggtcttttcggactcggaataccagctgccctacgtcctcggctccgcacaccagggctgcctgcctccgttcccggcggacgtcttcatgattcctcagtacggctacctgactctcaacaacggtagtcaggccgtgggacgttcctccttctactgcctggagtacttcccctctcagatgctgagaacgggcaacaacttttccttcagctacactttcgaggacgtgcctttccacagcagctacgcgcacagccagagtttggacaggctgatgaatcctctcatcgaccagtacctgtactacctgtcaagaacccagtctacgggaggcacagcgggaacccagcagttgctgttttctcaggccgggcctagcaacatgtcgactcaggccagaaactggctgcctggaccctgctacagacagcagcgcgtctccacgacactgtcgcaaaacaacaacagcaactttgcctggactggtgccaccaagtatcatctgaacggcagagactctctggtgaatccgggcgtcgccatggcaaccaacaaggacgacgaggaccgcttcttcccatccagcggcatcctcatgtttggcaagcagggagctggaaaagacaacgtggactatagcaacgtgatgctaaccagcgaggaagaaatcaagaccaccaaccccgtggccacagaacagtatggcgtggtggctgataacctacagcagcaaaacaccgctcctattgtgggggccgtcaacagccagggagccttacctggcatggtctggcagaaccgggacgtgtacctgcagggtcctatttgggccaagattcctcacacagatggcaactttcacccgtctcctttaatgggcggctttggacttaaacatccgcctcctcagatccttatcaaaaacactcctgttcctgcggatcctccaacagcgttcaaccaggccaagctgaattctttcatcacgcagtacagcaccggacaagtcagcgtggagatcgagtgggagctgcagaaggagaacagcaagcgctggaacccagagattcagtatacttccaactactacaaatctacaaatgtggactttgctgttaatactgagggtgcttactctgagcctcgccccattggcactcgttacctcacccgtaatctgtaa

SEQ ID NO: 2834 - protein, 737 aa, Artificial Sequence
  Synthetic polypeptide
MAADGYLPDWLEDNLSEGIREWWDLKPGAPKPKANQQKQDDGRGLVLPGYKYLGPFNGLDKGEPVNAADAAALEHDKAYDQQLKAGDNPYLRYNHADAEFQERLQEDTSFGGNLGRAVFQAKKRVLEPLGLVEEAAKTAPGKKRPVEPSPQRSPDSSTGIGKKGQQPARKRLNFGQTGDSESVPDPQPIGEPPAGPSGLGSGTMAAGGGAPMADNNEGADGVGNASGNWHCDSTWLGDRVITTSTRTWALPTYNNHLYKQISSQSAGSTNDNVYFGYSTPWGYFDFNRFHCHFSPRDWQRLINNNWGFRPKKLNFKLFNIQVKEVTTNDGVTTIANNLTSTVQVFSDSEYQLPYVLGSAHQGCLPPFPADVFMIPQYGYLTLNNGSQAVGRSSFYCLEYFPSQMLRTGNNFSFSYTFEDVPFHSSYAHSQSLDRLMNPLIDQYLYYLSRTQSTGGTAGTQQLLFSQAGPSNMSTQARNWLPGPCYRQQRVSTTLSQNNNSNFAWTGATKYHLNGRDSLVNPGVAMATNKDDEDRFFPSSGILMFGKQGAGKDNVDYSNVMLTSEEEIKTTNPVATEQYGVVADNLQQQNTAPIVGAVNSQGALPGMVWQNRDVYLQGPIWAKIPHTDGNFHPSPLMGGFGLKHPPPQILIKNTPVPADPPTAFNQAKLNSFITQYSTGQVSVEIEWELQKENSKRWNPEIQYTSNYYKSTNVDFAVNTEGAYSEPRPIGTRYLTRNL

SEQ ID NO: 2835 - DNA, 2217 bp, Artificial Sequence
  Synthetic polynucleotide
atggctgccgatggttatcttccagattggctcgaggacaacctctctgagggcattcgcgagtggtgggacctgaaacctggagccccgaaacccaaagccaaccagcaaaagcaggacgacggccggggtctggtgcttcctggctacaagtacctcggacccttcaacggactcgacaagggggagcccgtcaacgcggcggacgcagcggccctcgagcacgacaaggcctacgaccagcagctcaaagcgggtgacaatccgtacctgcggtataatcacgccgacgccgagtttcaggagcgtctgcaagaagatacgtcttttgggggcaacctcgggcgagcagtcttccaggccaagaagcgggttctcgaacctctcggtctggttgaggaaggcgctaagacggctcctggaaagaagagaccggtagagccgtcaccacagcgttcccccgactcctccacgggcatcggcaagaaaggccagcagcccgccagaaagagactcaatttcggtcagactggcgactcagagtcagtccccgaccctcaacctatcggagaacctccagcagcgccctctagtgtgggatctggtacaatggctgcaggcggtggcgcaccaatggcagacaataacgaaggtgccgacggagtgggtagttcctcgggaaattggcattgcgattccacatggctgggcgacagagtcatcaccaccagcacccgaacctgggccctgcccacctacaacaaccacctctacaagcaaatctccaacgggacctcgggaggcagcaccaacgacaacacctactttggctacagcaccccctgggggtattttgactttaacagattccactgccacttctcaccacgtgactggcagcgactcatcaacaacaactggggattccggcccaagagactcagcttcaagctcttcaacatccaggtcaaagaggtcacgcagaatgaaggcaccaagaccatcgccaataacctcaccagcaccatccaggtgtttacggactcggaataccagctgccgtacgtcctcggctctgcccaccagggctgcctgcctccgttcccggcggacgtcttcatgattcctcagtacggctacctgactctcaacaacggtagtcaggccgtgggacgttcctccttctactgcctggagtacttcccctctcagatgctgagaacgggcaacaacttttccttcagctacactttcgaggacgtgcctttccacagcagctacgcgcacagccagagtttggacaggctgatgaatcctctcatcgaccagtacctgtactacctgtcaagaacccagtctacgggaggcacagcgggaacccagcagttgctgttttctcaggccgggcctagcaacatgtcggctcaggccagaaactggctgcctggaccctgctacagacagcagcgcgtctccacgacactgtcgcaaaacaacaacagcaactttgcctggactggtgccaccaagtatcatctgaacggcagagactctctggtgaatccgggcgtcgccatggcaaccaacaaggacgacgaggaccgcttcttcccatccagcggcatcctcatgtttggcaagcagggagctggaaaagacaacgtggactatagcaacgtgatgctaaccagcgaggaagaaatcaaggccaccaaccccgtggccacagaacagtatggcgtggtggctgataacctacagcagcaaaacaccgctcctattgtgggggccgtcaacagccagggagccttacctggcatggtctggcagaaccgggacgtgtacctgcagggtcctatttgggccaagattcctcacacagatggcaactttcacccgtctcctttaatgggcggctttggacttaaacatccgcctcctcagatcctcatcaaaaacactcctgttcctgcggatcctccaacagcgttcaaccaggccaagctgaattctttcatcacgcagtacagcaccggacaagtcagcgtggagatcgagtgggagctgcagaaggagaacagcaagcgctggaacccagagattcagtatacttccaactactacaaatctacaaatgtggactttgctgttaatactgagggtgtttactctgagcctcgccccattggcactcgttacctcacccgtaatctgtaa

SEQ ID NO: 2836 - protein, 738 aa, Artificial Sequence
  Synthetic polypeptide
MAADGYLPDWLEDNLSEGIREWWDLKPGAPKPKANQQKQDDGRGLVLPGYKYLGPFNGLDKGEPVNAADAAALEHDKAYDQQLKAGDNPYLRYNHADAEFQERLQEDTSFGGNLGRAVFQAKKRVLEPLGLVEEGAKTAPGKKRPVEPSPQRSPDSSTGIGKKGQQPARKRLNFGQTGDSESVPDPQPIGEPPAAPSSVGSGTMAAGGGAPMADNNEGADGVGSSSGNWHCDSTWLGDRVITTSTRTWALPTYNNHLYKQISNGTSGGSTNDNTYFGYSTPWGYFDFNRFHCHFSPRDWQRLINNNWGFRPKRLSFKLFNIQVKEVTQNEGTKTIANNLTSTIQVFTDSEYQLPYVLGSAHQGCLPPFPADVFMIPQYGYLTLNNGSQAVGRSSFYCLEYFPSQMLRTGNNFSFSYTFEDVPFHSSYAHSQSLDRLMNPLIDQYLYYLSRTQSTGGTAGTQQLLFSQAGPSNMSAQARNWLPGPCYRQQRVSTTLSQNNNSNFAWTGATKYHLNGRDSLVNPGVAMATNKDDEDRFFPSSGILMFGKQGAGKDNVDYSNVMLTSEEEIKATNPVATEQYGVVADNLQQQNTAPIVGAVNSQGALPGMVWQNRDVYLQGPIWAKIPHTDGNFHPSPLMGGFGLKHPPPQILIKNTPVPADPPTAFNQAKLNSFITQYSTGQVSVEIEWELQKENSKRWNPEIQYTSNYYKSTNVDFAVNTEGVYSEPRPIGTRYLTRNL

SEQ ID NO: 2837 - DNA, 2217 bp, Artificial Sequence
  Synthetic polynucleotide
atggctgccgatggttatcttccagattggctcgaggacaacctctctgagggcattcgcgagtggtgggacctgaaacctggagccccgaaacccaaagccaaccagcaaaagcaggacgacggccggggtctggtgcttcctggctacaagcacctcggacccttcaacggactcgacaagggggagcccgtcaacgcggcggacgcagcggccctcgagcacgacaaggcctacgaccagcagctcaaagcgggtgacaatccgtacctgcggtataatcacgctgacgccgagtttcaggagcgtctgcaagaagatacgtcttttgggggcaacctcgggcgagcagtcttccaggccaagaagcgggttctcgaacctctcggtctggttgaggaaggcgctaagacggctcctggaaagaagagaccggtagagccgtcaccacagcgttcccccgactcctccacgggcatcggcaagaaaggccagcagcccgccagaaagagactcaatttcggtcagactggcgactcagagtcagtccccgaccctcaacctatcggagaacctccagcagcgccctctagtgtgggatctggtacaatggctgcaggcggtggcgcaccaatggcagacaataacgaaggtgccgacggagtgggtagttcctcgggaaattggcattgcgattccacatggctgggcgacagagtcatcaccaccagcacccgaacctgggccctgcccacctacaacaaccacctctacaagcaaatctccaacgggacctcgggaggcagcaccaacgacaacacctactttggctacagcaccccctgggggtattttgactttaacagattccactgccacttctcaccacgtgactggcagcgactcatcaacaacaactggggattccggcccaagagactcagcttcaagctcttcaacatccaggtcaaagaggtcacgcagaatgaaggcaccaagaccatcgccaataaccttaccagcacggttcaggtcttttcggactcggaataccagctgccctacgtcctcggctccgcacaccagggctgcctgcctccgttcccggcggacgtcttcatgattccccagtacggctacctgactctgaacaatggcagccaatcggtgggtcgttcctctttctactgcctggaatatttcccttctcaaatgctgagaacgggcaacaacttcaccttcagctacaccttcgaggacgttcccttccacagcagctacgcacacagccagagcctggaccggctgatgaatcctcttatcgaccagtacctgtattacctggccagaacacagagcaacgcaggaggcacagctggcaatcgggaactgcagttttatcagggcgggcctaccaccatggccgaacaagccaaaaactggctgcctggaccttgcttccggcaacaaagagtctccaagacgctggatcaaaacaacaacagcaactttgcttggactggtgccaccaaataccatctaaatggaagaaattcattggttaatcccggtgtcgccatggcaacccacaaggacgacgaggaacgcttcttcccttcgagcggagtcctgatttttggaaaaactggagcagctaataagactacactggaaaatgtgttaatgacaaatgaagaggaaattcgtcctaccaacccggtagccaccgaggaatacgggactgttagcagcaacctgcaggcggctaacactgcagcccagacacaagttgtcaacaaccagggagccttacctggtatggtctggcagaaccgggacgtgtacctgcagggtcccatctgggccaagattcctcacacggacggcaactttcacccgtctccgctgatgggcggctttggactgaagcatccgcctcctcagatcctgatcaaaaacactcctgttcctgctaatcccccggaggtgtttacgcctgccaagtttgcttctttcatcacacagtacagcaccggccaggtcagcgtggagatcgagtgggagctgcagaaggagaacagcaagcgctggaacccagagattcagtatacctccaattttgacaaacagactggtgtggactttgccgttgacagccagggtgtttattctgagcctcgccccattggtactcgttacctcacccgtaatctgtaa

SEQ ID NO: 2838 - protein, 738 aa, Artificial Sequence
  Synthetic polypeptide
MAADGYLPDWLEDNLSEGIREWWDLKPGAPKPKANQQKQDDGRGLVLPGYKHLGPFNGLDKGEPVNAADAAALEHDKAYDQQLKAGDNPYLRYNHADAEFQERLQEDTSFGGNLGRAVFQAKKRVLEPLGLVEEGAKTAPGKKRPVEPSPQRSPDSSTGIGKKGQQPARKRLNFGQTGDSESVPDPQPIGEPPAAPSSVGSGTMAAGGGAPMADNNEGADGVGSSSGNWHCDSTWLGDRVITTSTRTWALPTYNNHLYKQISNGTSGGSTNDNTYFGYSTPWGYFDFNRFHCHFSPRDWQRLINNNWGFRPKRLSFKLFNIQVKEVTQNEGTKTIANNLTSTVQVFSDSEYQLPYVLGSAHQGCLPPFPADVFMIPQYGYLTLNNGSQSVGRSSFYCLEYFPSQMLRTGNNFTFSYTFEDVPFHSSYAHSQSLDRLMNPLIDQYLYYLARTQSNAGGTAGNRELQFYQGGPTTMAEQAKNWLPGPCFRQQRVSKTLDQNNNSNFAWTGATKYHLNGRNSLVNPGVAMATHKDDEERFFPSSGVLIFGKTGAANKTTLENVLMTNEEEIRPTNPVATEEYGTVSSNLQAANTAAQTQVVNNQGALPGMVWQNRDVYLQGPIWAKIPHTDGNFHPSPLMGGFGLKHPPPQILIKNTPVPANPPEVFTPAKFASFITQYSTGQVSVEIEWELQKENSKRWNPEIQYTSNFDKQTGVDFAVDSQGVYSEPRPIGTRYLTRNL

SEQ ID NO: 2839 - protein, 737 aa, Artificial Sequence
  Synthetic polypeptide
MAADGYLPDWLEDNLSEGIREWWDLKPGAPKPKANQQKQDDGRGLVLPGYKYLGPFNGLDKGEPVNAADAAALEHDKAYDQQLKAGDNPYLRYNHADAEFQERLQEDTSFGGNLGRAVFQAKKRVLEPLGLVEEAAKTAPGKKRPVEPSPQRSPDSSTGIGKKGQQPARKRLNFGQTGDSESVPDPQPIGEPPAGPSGLGSGTMAAGGGAPMADNNKGADGVGNASGNWHCDSTWLGDRVITTSTRTWALPTYNNHLYKQISSQSAGSTNDNVYFGYSTPWGYFDFNRFHCHFSPRDWQRLINSNWGFRPKKLNFKLFNIQVKEVTTNDGVTTIANNLTSTVQVFSDSEYQLPYVLGSAHQGCLPPFPADVFMIPQYGYLTLNNGSQSVGRSSFYCLEYFPSQMLRTGNNFTFSYTFEDVPFHSSYAHSQSLDRLMNPLIDQYLYYLARTQSNAGGTAGNRELQFYQGGPTTMAEQAKNWLPGPCFRQQRVSKTLDQNNNSNFAWTGATKYHLNGRNSLVNPGVAMATHKDDEERFFPSSGVLIFGKTGAANKTTLENVLMTNEEEIRPTNPVATEEYGTVSSNLQAANTAAQTQVVNNQGALPGMVWQNRDVYLQGPIWAKIPHTDGNFHPSPLMGGFGLKHPPPQILIKNTPVPANPPEVFTPAKFASFITQYSTGQVSVEIEWELQKENSKRWNPEIQYTSNFDKQTGVDFAVDSQGVYSEPRPIGTRYLTRNL

SEQ ID NO: 2840 - protein, 737 aa, Artificial Sequence
  Synthetic polypeptide
MAADGYLPDWLEDNLSEGIREWWDLKPGAPKPKANQQKQDDGRGLVLPGYKYLGPFNGLDKGEPVNAADAAALEHDKAYDQQLKAGDNPYLRYNHADAEFQERLQEDTSFGGNLGRAVFQAKKRVLEPLGLVEEAAKTAPGKKRPVEPSPQRSPDSSTGIGKKGQQPARKRLNFGQTGDSESVPDPQPIGEPPAGPSGLGSGTMAAGGGAPMADNNEGADGVGNASGNWHCDSTWLGDRVITTSTRTWALPTYNNHLYKQISSQSAGSTNDNVYFGYSTPWGYFDFNRFHCHFSPRDWQRLINSNWGFRPKKLNFKLFNIQVKEVTTNDGVTTIANNLTSTVQVFSDSEYQLPYVLGSAHQGCLPPFPADVFMIPQYGYLTLNNGSQSVGRSSFYCLEYFPSQMLRTGNNFTFSYTFEDVPFHSSYAHSQSLDRLMNPLIDQYLYYLARTQSNAGGTAGNRELQFYQGGPTTMAEQAKNWLPGPCFRQQRVSKTLDQNNNSNFAWTGATKYHLNGRNSLVNPGVAMATHKDDEERFFPSSGVLIFGKTGAANKTTLENVLMTNEEEIRPTNPVATEEYGTVSSNLQAANTAAQTQVVNNQGALPGMVWQNRDVYLQGPIWAKIPHTDGNFHPSPLMGGFGLKHPPPQILIKNTPVPANPPEVFTPAKFASFITQYSTGQVSVEIEWELQKENSKRWNPEIQYTSNFDKQTGVDFAVDSQGVYSEPRPIGTRYLTRNL

SEQ ID NO: 2841 - protein, 737 aa, Artificial Sequence
  Synthetic polypeptide
MAADGYLPDWLEDNLSEGIREWWDLKPGAPKPKANQQKQDDGRGLVLPGYKYLGPFNGLDKGEPVNAADAAALEHDKAYDQQLKAGDNPYLRYNHADAEFQERLQEDTSFGGNLGRAVFQAKKRVLEPLGLVEEAAKTAPGKKRPVEPSPQRSPDSSTGIGKKGQQPARKRLNFGQTGDSESVPDPQPIGEPPAGPSGLGSGTMAAGGGAPMADNNEGADGVGNASGNWHCDSTWLGDRVITTSTRTWALPTYNNHLYKQISSQSAGSTNDNVYFGYSTPWGYFDFNRFHCHFSPRDWQRLINNNWGFRPKKLNFKLFNIQVKEVTTNDGVTTIANNLTSTVQVFSDSEYQLPYVLGSAHQGCLPPFPADVFMIPQYGYLTLNNGSQSVGRSSFYCLEYFPSQMLRTGNNFTFSYTFEDVPFHSSYAHSQSLDRLMNPLIDQYLYYLARTQSNAGGTAGNRELQFYQGGPTTMAEQAKNWLPGPCFRQQRVSKTLDQNNNSNFAWTGATKYHLNGRNSLVNPGVAMATHKDDEERFFPSSGVLIFGKTGAANKTTLENVLMTNEEEIRPTNPVATEEYGTVSSNLQAANTAAQTQVVNNQGALPGMVWQNRDVYLQGPIWAKIPHTDGNFHPSPLMGGFGLKHPPPQILIKNTPVPANPPEVFTPAKFASFITQYSTGQVSVEIEWELQKENSKRWNPEIQYTSNFDKQTGVDFAVDSQGVYSEPRPIGTRYLTRNL

SEQ ID NO: 2842 - protein, 737 aa, Artificial Sequence
  Synthetic polypeptide
MAADGYLPDWLEDNLSEGIREWWDLKPGAPKPKANQQKQDDGRGLVLPGYKYLGPFNGLDKGEPVNAADAAALEHDKAYDQQLKAGDNPYLRYNHADAEFQERLQEDTSFGGNLGRAVFQAKKRVLEPLGLVEEAAKTAPGKKRPVEPSPQRSPDSSTGIGKKGQQPARKRLNFGQTGDSESVPDPQPIGEPPAGPSGLGSGTMAAGGGAPMADNNKGADGVGNASGNWHCDSTWLGDRVITTSTRTWALPTYNNHLYKQISSQSAGSTNDNVYFGYSTPWGYFDFNRFHCHFSPRDWQRLINNNWGFRPKKLNFKLFNIQVKEVTTNDGVTTIANNLTSTVQVFSDSEYQLPYVLGSAHQGCLPPFPADVFMIPQYGYLTLNNGSQSVGRSSFYCLEYFPSQMLRTGNNFTFSYTFEDVPFHSSYAHSQSLDRLMNPLIDQYLYYLARTQSNAGGTAGNRELQFYQGGPTTMAEQAKNWLPGPCFRQQRVSKTLDQNNNSNFAWTGATKYHLNGRNSLVNPGVAMATHKDDEERFFPSSGVLIFGKTGAANKTTLENVLMTNEEEIRPTNPVATEEYGTVSSNLQAANTAAQTQVVNNQGALPGMVWQNRDVYLQGPIWAKIPHTDGNFHPSPLMGGFGLKHPPPQILIKNTPVPANPPEVFTPAKFASFITQYSTGQVSVEIEWELQKENSKRWNPEIQYTSNFDKQTGVDFAVDSQGVYSEPRPIGTRYLTRNL

SEQ ID NO: 2843 - DNA, 2214 bp, Artificial Sequence
  Synthetic polynucleotide
atggctgctgacggttatcttccagattggctcgaggacaacctctctgagggcattcgcgagtggtgggacctgaaacctggagcccccaagcccaaggccaaccagcagaagcaggacgacggccggggtctggtgcttcctggctacaagtacctcggacccttcaacggactcgacaagggggagcccgtcaacgcggcggacgcagcggccctcgagcacgacaaggcctacgaccagcagctcaaagcgggtgacaatccgtacctgcggtataaccacgccgacgccgagtttcaggagcgtctgcaagaagatacgtcttttgggggcaacctcgggcgagcagtcttccaggccaagaagcgggttctcgaacctctcggtctggttgaggaagctgctaagacggctcctggaaagaagagaccggtagaaccgtcacctcagcgttcccccgactcctccacgggcatcggcaagaaaggccagcagcccgctagaaagagactgaactttgggcagactggcgactcagagtcagtccccgaccctcaaccaatcggagaaccaccagcaggcccctctggtctgggatctggtacaatggctgcaggcggtggcgcaccaatggctgacaataacaagggcgccgacggagtgggtaatgcctcaggaaattggcattgcgattccacatggctgggcgacagagtcatcaccaccagcacccgaacctgggctttgcccacctacaacaaccacctctacaagcaaatctccagtcagtcagcaggtagcaccaacgacaacgtctacttcggctacagcaccccctgggggtattttgacttcaacagattccactgtcacttctcaccacgtgactggcagcggctcatcaacagcaactggggattccggcccaagaagctcaacttcaagctgttcaacatccaggtcaaggaggtcacaacgaatgacggcgtcacgaccatcgccaataaccttaccagcacggttcaggtcttttcggactcggaataccagctgccctacgtcctcggctccgcacaccagggctgcctgcctccgttcccggcggacgtcttcatgattccccagtacggctacctgactctgaacaatggcagccaatcggtgggtcgttcctctttctactgcctggaatatttcccttctcaaatgctgagaacgggcaacaacttcaccttcagctacaccttcgaggacgttcccttccacagcagctacgcacacagccagagcctggaccggctgatgaatcctcttatcgaccagtacctgtattacctggccagaacacagagcaacgcaggaggcacagctggcaatcgggaactgcagttttatcagggcgggcctaccaccatggccgaacaagccaaaaactggctgcctggaccttgcttccggcaacaaagagtctccaagacgctggatcaaaacaacaacagcaactttgcttggactggtgccaccaaataccatctaaatggaagaaattcattggttaatcccggtgtcgccatggcaacccacaaggacgacgaggaacgcttcttcccttcgagcggagtcctgatttttggaaaaactggagcagctaataagactacactggaaaatgtgttaatgacaaatgaagaggaaattcgtcctaccaacccggtagccaccgaggaatacgggactgttagcagcaacctgcaggcggctaacactgcagcccagacacaagttgtcaacaaccagggagccttacctggtatggtctggcagaaccgggacgtgtacctgcagggtcccatctgggccaagattcctcacacggacggcaactttcacccgtctccgctgatgggcggctttggactgaagcatccgcctcctcagatcctgatcaaaaacactcctgttcctgctaatcccccggaggtgtttacgcctgccaagtttgcttctttcatcacacagtacagcaccggccaggtcagcgtggagatcgagtgggagctgcagaaggagaacagcaagcgctggaacccagagattcagtatacctccaattttgacaaacagactggtgtggactttgccgttgacagccagggtgtttattctgagcctcgccccattggtactcgttacctcacccgtaatctgtaa

SEQ ID NO: 2844 - DNA, 2217 bp, Artificial Sequence
  Synthetic polynucleotide
atggctgccgatggttatcttccagattggctcgaggacaacctctctgagggcattcgcgagtggtgggacctgaaacctggagccccgaaacccaaagccaaccagcaaaagcaggacgacggccggggtctggtgcttcctggctacaagtacctcggacccttcaacggactcgacaagggggagcccgtcaacgcggcggacgcagcggccctcgagcacgacaaggcctacgaccagcagctcaaagcgggtgacaatccgcacctgcggtataatcacgccgacgccgagtttcaggagcgtctgcaagaagatacgtcttttgggggcaacctcgggcgagcagtcttccaggccaagaagcgggttctcgaacctctcggtctggttgaggaaggcgctaagacggctcctggaaagaagagaccggtagagccgtcaccacagcgttcccccgactcctccacgggcatcggcaagaaaggccagcagcccgccagaaagagactcaatttcggtcagactggcgactcagagtcagtccccgaccctcaacttatcggagaacctccagcagcgccctctagtgtgggatctggtacaatggctgcaggcggtggcgcaccaatggcagacaataacgaaggtgccgacggagtgggtagttcctcgggaaattggcattgcgattccacatggctgggcgacagagtcatcaccaccagcacccgaacctgggccctgcccacctacaacaaccacctctacaagcaaatctccaacgggacctcgggaggcagcaccaacgacaacacctactttggctacagcaccccctgggggtattttgactttaacagattccactgccacttctcaccacgtgactggcagcgactcatcaacaacaactggggattccggcccaagagactcagcttcaagctcttcaacatccaggtcaaagaggtcacgcagaatgaaggcaccaagaccatcgccaataacctcaccagcaccatccaggtgtttacggactcggagtaccagctgccgtacgtcctcggctctgcccaccagggctgcctgcctccgttcccggcggacgtcttcatgattcctcagtacggcaacctgactctcaacaacggtagtcaggccgtgggacgttcctccttctactgcctggagtacttcccctctcagatgctgagaacgggcaacaacttttccttcagctacactttcgaggacgtgcctttccacagcagctacgcgcacagccagagtttggacaggctgatgaatcctctcatcgaccagtacctgtactacctgtcaagaacccagtctacgggaggcacagcgggaacccagcagttgctgttttctcaggccgggcctagcaacatgtcggctcaggccagaaactggctgcctggaccctgctacagacagcagcgcgtctccacgacactgtcgcaaaacaacaacagcaactttgcctggactggtgccaccaagtatcatctgaacggcagagactctctggtgaatccgggcgtcgccatggcaaccaacaaggacgacgaggaccgcttcttcccatccagcggcatcctcatgtttggcaagcagggagctggaaaagacaacatgggctatagcaacgtgatgctaaccagcgaggaagaaatcaagaccaccaaccccgtggccacagaacagtatggcgtggtggctgataacctacagcagcaaaacaccgctcctattgtgggggccgtcaacagccagggagccttacctggcatggtctggcagaaccgggacgtgtacctgcagggtcctatttgggccaagattcctcacacagatggcaactttcacccgtctcctttaatgggcggctttggacttaaacatccgcctcctcagatcctcatcaaaaacactcctgttcctgcggatcctccaacagcgttcaaccaggccaagctgaattctttcatcacgcagtacggcaccggacaagtcagcgtggagatcgagtgggagctgcagaaggagaacagcaagcgctggaacccagagattcagtatacttccaactactacaaatctacaaatgtggactttgctgttaatactgagggtgtttactctgagcctcgccccattggcactcgttacctcacccgtaatctgtaa

SEQ ID NO: 2845 - protein, 738 aa, Artificial Sequence
  Synthetic polypeptide
MAADGYLPDWLEDNLSEGIREWWDLKPGAPKPKANQQKQDDGRGLVLPGYKYLGPFNGLDKGEPVNAADAAALEHDKAYDQQLKAGDNPHLRYNHADAEFQERLQEDTSFGGNLGRAVFQAKKRVLEPLGLVEEGAKTAPGKKRPVEPSPQRSPDSSTGIGKKGQQPARKRLNFGQTGDSESVPDPQLIGEPPAAPSSVGSGTMAAGGGAPMADNNEGADGVGSSSGNWHCDSTWLGDRVITTSTRTWALPTYNNHLYKQISNGTSGGSTNDNTYFGYSTPWGYFDFNRFHCHFSPRDWQRLINNNWGFRPKRLSFKLFNIQVKEVTQNEGTKTIANNLTSTIQVFTDSEYQLPYVLGSAHQGCLPPFPADVFMIPQYGNLTLNNGSQAVGRSSFYCLEYFPSQMLRTGNNFSFSYTFEDVPFHSSYAHSQSLDRLMNPLIDQYLYYLSRTQSTGGTAGTQQLLFSQAGPSNMSAQARNWLPGPCYRQQRVSTTLSQNNNSNFAWTGATKYHLNGRDSLVNPGVAMATNKDDEDRFFPSSGILMFGKQGAGKDNMGYSNVMLTSEEEIKTTNPVATEQYGVVADNLQQQNTAPIVGAVNSQGALPGMVWQNRDVYLQGPIWAKIPHTDGNFHPSPLMGGFGLKHPPPQILIKNTPVPADPPTAFNQAKLNSFITQYGTGQVSVEIEWELQKENSKRWNPEIQYTSNYYKSTNVDFAVNTEGVYSEPRPIGTRYLTRNL

SEQ ID NO: 2846 - DNA, 2217 bp, Artificial Sequence
  Synthetic polynucleotide
atggctgccgatggttatcttccagattggctcgaggacaacctctctgagggcattcgcgagtggtgggacctgaaacctggagccccgaaacccaaagccaaccagcaaaagcaggacgacggccggggtctggtgcttcctggctacaagtacctcggacccttcaacggactcgacaagggggagcccgtcaacgcggcggacgcagcggccctcgagcacgacaaggcctacgaccagcagctcaaagcgggtgacaatccgtacctgcggtataatcacgccgacgccgagtttcaggagcgtctgcaagaagatacgtcttttgggggcaacctcgggcgagcagtcttccaggccaagaagcgggttctcgaacctctcggtctggttgaggaaggcgctaagacggctcctggaaagaagagaccggtagagccgtcaccacagcgttcccccgactcctccacgggcatcggcaagaaaggccagcagcccgccggaaagagactcaatttcggtcagactggcgactcagagtcagtccccgaccctcaacctatcggagaacctccagcagcgccctctagtgtgggatctggtacaatggctgcaggcggtggcgcaccaatggcagacaataacgaaggtgccgacggagtgggtagttcctcgggaaattggcattgcgattccacatggctgggcgacagagtcatcaccaccagcacccgaacctgggccctgcccacctacaacaaccacctctacaagcaaatctccaacgggacctcgggaggcagcaccaacgacaacacctactttggctacagcaccccctgggggtattttgactttaacagattccactgccacttctcaccacgtgactggcagcgactcatcaacaacaactggggattccggcccaagagactcagcttcaagctcttcaacatccaggtcaaagaggtcacgcagaatgaaggcaccaagaccatcgccaataacctcaccagcaccatccaggtgtttacggactcggaataccagctgccgtacgtcctcggctctgcccaccagggctgcctgcctccgttcccggcggacgtcttcatgattcctcagtacggctacctgactctcaacaacggtagtcaggccgtgggacgttcctccttctactgcctggagtacttcccctctcagatgctgagaacgggcaacaacttttccttcagctacactttcgaggacgtgcctttccacagcagctacgcgcacagccagagtttggacaggctgatgaatcctctcgtcgaccagtacctgtactacctgtcaagaacccagtctacgggaggcacagcgggaacccagcagttgctgttttctcaggccgggcctagcaacatgtcggctcaggccagaaactggctgcctggaccctgctacagacagcagcgcgtctccacgacactgtcgcaaaacaacaacagcaactttgcctggactggtgccaccaagtatcatctgaacggcagagactctctggtgaatccgggcgtcgccatggcaaccaacaaggacgacgaggaccgcttcttcccatccagcggcatcctcatgtttggcaagcagggagctggaaaagacaacgtggactatagcaacgtgatgctaaccagcgaggaagaaatcaagaccaccaaccccgtggccacagaacagtatggcgtggtggctgataacctacagcagcaaaacaccgctcctattgtgggggccgtcaacagccagggagccttacctggcatggtctggcagaaccgggacgtgtacctgcagggtcctatttgggccaagattcctcacacagatggcaactttcacccgtctcctttaatgggcggctttggacttaaacatccgcctcctcagatcctcatcaaaaacactcctgttcctgcggatcctccaacagcgttcaaccaggccaagctgaattctttcatcacgcagtacagcaccggacaagtcagcgtggagatcgagtgggagctgcagaaggagaacagcaagcgctggagcccagagattcagtatacttccaactactacaaatctacaaatgtggactttgctgttaatactgagggtgtttactctgagcctcgccccattggcactcgttacctcacccgtaatctgtaa

SEQ ID NO: 2847 - protein, 738 aa, Artificial Sequence
  Synthetic polypeptide
MAADGYLPDWLEDNLSEGIREWWDLKPGAPKPKANQQKQDDGRGLVLPGYKYLGPFNGLDKGEPVNAADAAALEHDKAYDQQLKAGDNPYLRYNHADAEFQERLQEDTSFGGNLGRAVFQAKKRVLEPLGLVEEGAKTAPGKKRPVEPSPQRSPDSSTGIGKKGQQPAGKRLNFGQTGDSESVPDPQPIGEPPAAPSSVGSGTMAAGGGAPMADNNEGADGVGSSSGNWHCDSTWLGDRVITTSTRTWALPTYNNHLYKQISNGTSGGSTNDNTYFGYSTPWGYFDFNRFHCHFSPRDWQRLINNNWGFRPKRLSFKLFNIQVKEVTQNEGTKTIANNLTSTIQVFTDSEYQLPYVLGSAHQGCLPPFPADVFMIPQYGYLTLNNGSQAVGRSSFYCLEYFPSQMLRTGNNFSFSYTFEDVPFHSSYAHSQSLDRLMNPLVDQYLYYLSRTQSTGGTAGTQQLLFSQAGPSNMSAQARNWLPGPCYRQQRVSTTLSQNNNSNFAWTGATKYHLNGRDSLVNPGVAMATNKDDEDRFFPSSGILMFGKQGAGKDNVDYSNVMLTSEEEIKTTNPVATEQYGVVADNLQQQNTAPIVGAVNSQGALPGMVWQNRDVYLQGPIWAKIPHTDGNFHPSPLMGGFGLKHPPPQILIKNTPVPADPPTAFNQAKLNSFITQYSTGQVSVEIEWELQKENSKRWSPEIQYTSNYYKSTNVDFAVNTEGVYSEPRPIGTRYLTRNL

SEQ ID NO: 2848 - DNA, 2217 bp, Artificial Sequence
  Synthetic polynucleotide
atggttgccgatggttatcttccagattggctcgaggacaacctctctgagggcattcgcgagtggtgggacctgaaacctggagccccgaaacccaaagccaaccagcaaaagcagggcgacggccggggtctggtgcttcctggctacaagtacctcggacccttcaacggactcgacaagggggagcccgtcaacgcggcggacgcagcggccctcgagcacgacaaggcctacgaccagcagcttaaagcgggtgacaatccgtacctgcggtataatcacgccgacgccgagcttcaggagcgtctgcaagaagatacgtcttttgggggcaacctcgggcgagcagtcttccaggccaagaagcgggttctcgaacctctcggtctggttgaggaaggcgctaagacggctcctggaaagaagagaccggtagagccgtcaccacagcgttcccccgactcctccacgggcatcggcaagaaaggccagcagcccgccagaaagagactcaatttcggtcagactggcgactcagagtcagtccccgaccctcaacctatcggagaacctccagcagcgccctctagtgtgggatctggtacaatggctgcaggcggtggcgcgccaatggcagacaataacgaaggtgccgacggagtgggtagttcctcgggaaattggcattgcgattccacatggctgggcgacagagtcatcaccaccagcacccgaacctgggccctgcccacctacaacaaccacctctacaagcaaatctccaacgggacctcgggaggcagcaccaacgacaacacctactttggctacagcaccccctgggggtattttgactttaacagattccactgccacttctcaccacgtgactggcagcgactcatcaacaacaactggggattccggcccaagagactcagcttcaagctcttcaacatccaggtcaaagaggtcacgcagaatgaaggcaccaagaccatcgccaataacctcaccagcaccatccaggtgtttacggactcggaataccagctgccgtacgtcctcggctctgcccaccagggctgccagcctccgttcccggcggacgtcttcatgattcctcagtacggctacctgactctcaacaacggtagtcaggccgtgggacgttcctccttctactgcctggagtacttcccctctcagatgctgagaacgggcaacaacttttccttcagctacactttcgaggacgtgcctttccacagcagctacgcgcacagccagagtttggacaggctgatgaatcctctcatcgaccagtacctgtactacctgtcaagaacccagtctacgggaggcacagcgggaacccagcagttgctgttttctcaggccgggcctagcaacatgtcggctcaggccagaaactggctgcctggaccctgctacagacagcagcgcgtctccacgacactgtcgcaaaacaacaacagcaactttgcctggactggtgccaccaagtatcatctgaacggcagagactctctggtgaatccgggcgtcgccatggcaaccaacaaggacgacgaggaccgcttcttcccatccagcggcatcctcatgtttggcaagcagggagctggaaaagacaacgtggactatagcaacgtgatgctaaccagcgaggaagaaatcaagaccaccaaccccgtggccacagaacagtatggcgtggtggctgataacctacagcagcaaaacaccgctcctattgtgggggccgtcaacagccagggagccttacctggcatggtctggcagaaccgggacgtgtacctgcagggtcctatttgggccaagattcctcacacagatggcaactttcacccgtctcctttaatgggcggctttggacttaaacatccgcctcctcagatcctcatcaaaaacactcctgttcctgcggatcctccaacagcgttcaaccaggccaagctgaattctttcatcacgcagtacagcaccggacaagtcagcgtggagatcgagtgggagccgcagaaggagaacagcaagcgctggaacccagagattcagtatacttccaactactacaaatctacaaatgtggactttgctgttaatactgagggtgtttactctgagcctcgccccattggcactcgttacctcacccgtaatctgtaa

SEQ ID NO: 2849 - protein, 738 aa, Artificial Sequence
  Synthetic polypeptide
MVADGYLPDWLEDNLSEGIREWWDLKPGAPKPKANQQKQGDGRGLVLPGYKYLGPFNGLDKGEPVNAADAAALEHDKAYDQQLKAGDNPYLRYNHADAELQERLQEDTSFGGNLGRAVFQAKKRVLEPLGLVEEGAKTAPGKKRPVEPSPQRSPDSSTGIGKKGQQPARKRLNFGQTGDSESVPDPQPIGEPPAAPSSVGSGTMAAGGGAPMADNNEGADGVGSSSGNWHCDSTWLGDRVITTSTRTWALPTYNNHLYKQISNGTSGGSTNDNTYFGYSTPWGYFDFNRFHCHFSPRDWQRLINNNWGFRPKRLSFKLFNIQVKEVTQNEGTKTIANNLTSTIQVFTDSEYQLPYVLGSAHQGCQPPFPADVFMIPQYGYLTLNNGSQAVGRSSFYCLEYFPSQMLRTGNNFSFSYTFEDVPFHSSYAHSQSLDRLMNPLIDQYLYYLSRTQSTGGTAGTQQLLFSQAGPSNMSAQARNWLPGPCYRQQRVSTTLSQNNNSNFAWTGATKYHLNGRDSLVNPGVAMATNKDDEDRFFPSSGILMFGKQGAGKDNVDYSNVMLTSEEEIKTTNPVATEQYGVVADNLQQQNTAPIVGAVNSQGALPGMVWQNRDVYLQGPIWAKIPHTDGNFHPSPLMGGFGLKHPPPQILIKNTPVPADPPTAFNQAKLNSFITQYSTGQVSVEIEWEPQKENSKRWNPEIQYTSNYYKSTNVDFAVNTEGVYSEPRPIGTRYLTRNL

SEQ ID NO: 2850 - DNA, 2217 bp, Artificial Sequence
  Synthetic polynucleotide
atggctgccgatggttatcttccagattggctcgaggacaacctctctgagggcattcgcgagtggtgggacctgaaacctggagccccgaaacccaaagccaaccagcaaaagcaggacgacggccggggtctggtgcttcctggctacaagtacctcggacccttcaacggactcgacaagggggagcccgtcaacgcggcggacgcagcggccctcgagcacgacaaggcctacgaccagcagctcaaagcgggtgacaatccgtacctgcggtataatcacgccgacgccgagtttcaggagcgtctgcaagaagatacgtcttttgggggcaacctcgggcgagcagtcttccaggccaagaagcgggttctcgaacctctcggtctggttgaggaaggcgctaagacggctcctggaaagaagagaccggtagagccgtcaccacagcgttcccccgactcctccacgggcatcggcaagaaaggccagcagcccgccagaaagagactcaatttcggtcagactggcgactcagagtcagtccccgaccctcaacctatcggagaacctccagcagcgccctctagtgtgggatctggtacaatggctgcaggcggtggcgcaccaatggcagacaataacgaaggtgccgacggagtgggtagttcctcgggaaattggcattgcgattccacatggctgggcgacagagtcatcaccaccagcacccgaacctgggccctgcccacctacaacaaccacctctacaagcaaatctccaacgggacctcgggaggcagcaccaacgacaacacctactttggctacagcaccccctgggggtattttgactttaacagattccactgccacttctcaccacgtgactggcagcgactcatcaacaacaactggggattccggcccaagagactcagcttcaagctcttcaacatccaggtcaaagaggtcacgcagaatgaaggcaccaagaccatcgccaatagcctcaccagcaccatccaggtgtttacggactcggaataccagctgccgtacgtcctcggctctgcccaccagggctgcctgcctccgttcccggcggacgtcttcatgattcctcagtacggctacctgactcccaacaacggtagtcaggccgtgggacgttcctccttctactgcctggagtacttcccctctcagatgctgagaacgggcaacaacttttccttcagctacactttcgaggacgtgcctttccacagcagctacgcgcacagccagagtttggacaggctgatgaatcctctcatcgaccagtacctgtactacctgtcaagaacccagtctacgggaggcacagcgggaacccagcagttgctgtcttctcaggccgggcctagcaacatgtcggctcaggccagaaactggctgcctggaccctgctacagacagcagcgcgtctccacgacactgtcgcaaaacaacaacagcaactttgcctggactggtgccaccaagtatcatctgaacggcagagactctctggtgaatccgggcgtcgccatggcaaccaacaaggacgacgaggaccgcttcttcccatccagcggcatcctcatgtttggcaagcagggagctggaaaagacaacgtggactatagcaacgtgatgctaaccagcgaggaagaaatcaagaccaccaaccccgtggccacagaacagtatggcgtggtggctgataacctacagcagcaaaacaccgctcctattgtgggggccgtcaacagccagggagccttacctggcatggtctggcagaaccgggacgtgtacttgcagggtcctatttgggccaagattcctcacacagatggcaactttcacccgtctcctttaatgggcggctttggacttaaacatccgcctcctcagatcctcatcaaaaacactcctgttcctgcggatcctccaacagcgttcaaccaggccaagctgaattctttcatcacgcagtacagcaccggacaagtcagcgtggagatcgagtgggagctgcagaaggagaacagcaagcgctggaacccagagattcagtatacttccaactactacaaatctacaaatgtggactttgctgttaatactgagggtgtttactctgagcctcgccccattggcactcgttacctcacccgtaatctgtaa

SEQ ID NO: 2851 - protein, 738 aa, Artificial Sequence
  Synthetic polypeptide
MAADGYLPDWLEDNLSEGIREWWDLKPGAPKPKANQQKQDDGRGLVLPGYKYLGPFNGLDKGEPVNAADAAALEHDKAYDQQLKAGDNPYLRYNHADAEFQERLQEDTSFGGNLGRAVFQAKKRVLEPLGLVEEGAKTAPGKKRPVEPSPQRSPDSSTGIGKKGQQPARKRLNFGQTGDSESVPDPQPIGEPPAAPSSVGSGTMAAGGGAPMADNNEGADGVGSSSGNWHCDSTWLGDRVITTSTRTWALPTYNNHLYKQISNGTSGGSTNDNTYFGYSTPWGYFDFNRFHCHFSPRDWQRLINNNWGFRPKRLSFKLFNIQVKEVTQNEGTKTIANSLTSTIQVFTDSEYQLPYVLGSAHQGCLPPFPADVFMIPQYGYLTPNNGSQAVGRSSFYCLEYFPSQMLRTGNNFSFSYTFEDVPFHSSYAHSQSLDRLMNPLIDQYLYYLSRTQSTGGTAGTQQLLSSQAGPSNMSAQARNWLPGPCYRQQRVSTTLSQNNNSNFAWTGATKYHLNGRDSLVNPGVAMATNKDDEDRFFPSSGILMFGKQGAGKDNVDYSNVMLTSEEEIKTTNPVATEQYGVVADNLQQQNTAPIVGAVNSQGALPGMVWQNRDVYLQGPIWAKIPHTDGNFHPSPLMGGFGLKHPPPQILIKNTPVPADPPTAFNQAKLNSFITQYSTGQVSVEIEWELQKENSKRWNPEIQYTSNYYKSTNVDFAVNTEGVYSEPRPIGTRYLTRNL

SEQ ID NO: 2852 - protein, 738 aa, Artificial Sequence
  Synthetic polypeptide
MAADGYLPDWLEDNLSEGIREWWDLKPGAPKPKANQQKQDDGRGLVLPGYKYLGPFNGLDKGEPVNAADAAALEHDKAYDQQLKAGDNPYLRYNHADAEFQERLQEDTSFGGNLGRAVFQAKKRVLEPLGLVEEGAKTAPGKKRPVEPSPQRSPDSSTGIGKKGQQPARKRLNFGQTGDSESVPDPQPIGEPPAAPSSVGSGTMAAGGGAPMADNNEGADGVGSSSGNWHCDSTWLGDRVITTSTRTWALPTYNNHLYKQISNGTSGGSTNDNTYFGYSTPWGYFDFNRFHCHFSPRDWQRLINNNWGFRPKRLSFKLFNIQVKEVTQNEGTKTIANNLTSTIQVFTDSEYQLPYVLGSAHQGCLPPFPADVFMIPQYGYLTLNNGSQAVGRSSFYCLEYFPSQMLRTGNNFSFSYTFEDVPFHSSYVHSQSLDRLMNPLIDQYLYYLSRTQSTGGTAGTQQLLFSQAGPSNMSAQARNWLPGPCYRQQRVSTTLSQNNNSNFAWTGATKYHLNGRDSLVNSGVAMATNKDDEDRFFPSSGILMFGKQGAGKDNVDYSNVMLTSEEEIKTTNPVATEQYGVVADNLQQQNTAPIVGAVNSQGALPGMVWQNRDVYLQGPIWAKIPHTDGNFHPSPLMGGFGLKHPPPQILIKNTPVPADPPTAFNQAKLNSFITQYSTGQVSVEIEWELQKENSKRWNPEIQYTSNYYKSTNVDFAVNTEGVYSEPRPIGTRYPTRNL

SEQ ID NO: 2853 - DNA, 2217 bp, Artificial Sequence
  Synthetic polynucleotide
atggctgccgatggttatcttccagattggctcgaggacaacctctctgagggcattcgcgagtggtgggacctgaaacctggagccccgaaacccaaagccaaccagcaaaagcaggacgacggccggggtctggtgcttcctggctacaagtacctcggacccttcaacggactcgacaagggggagcccgtcaacgcggcggacgcagcggccctcgagcacgacaaggcctacgaccagcagctcaaagcgggtgacaatccgtacctgcggtataatcacgccgacgccgagtttcaggagcgtctgcaagaagatacgtcttttgggggcaacctcgggcgagcagtcttccaggccaagaagcgggttctcgaacctctcggtctggttgaggaaggcgctaagacggctcctggaaagaagagaccggtagagccgtcaccacagcgttcccccgactcctccacgggcatcggcaagaaaggccagcagcccgccagaaagagactcaatttcggtcagactggcgactcagagtcagtccccgaccctcaacctatcggagaacctccagcagcgccctctagtgtgggatctggtacaatggctgcaggcggtggcgcaccaatggcagacaataacgaaggtgccgacggagtgggtagttcctcgggaaattggcattgcgattccacatggctgggcgacagagtcatcaccaccagcacccgaacctgggccctgcccacctacaacaaccacctctacaagcaaatctccaacgggacctcgggaggcagcaccaacgacaacacctactttggctacagcaccccctgggggtattttgactttaacagattccactgccacttctcaccacgtgactggcagcgactcatcaacaacaactggggattccggcccaagagactcagcttcaagctcttcaacatccaggtcaaagaggtcacgcagaatgaaggcaccaagaccatcgccaataacctcaccagcaccatccaggtgtttacggactcggaataccagctgccgtacgtcctcggctctgcccaccagggctgcctgcctccgttcccggcggacgtcttcatgattcctcagtacggctacctgactctcaacaacggtagtcaggccgtgggacgttcctccttctactgcctggagtacttcccctctcagatgctgagaacgggcaacaacttttccttcagctacactttcgaggacgtgcctttccacagcagctacgtgcacagccagagtttggacaggctgatgaatcctctcatcgaccagtacctgtactacctgtcaagaacccagtctacgggaggcacagcgggaacccagcagttgctgttttctcaggccgggcctagcaacatgtcggctcaggccagaaactggctgcctggaccctgctacagacagcagcgcgtctccacgacactgtcgcaaaacaacaacagcaactttgcctggactggtgccaccaagtatcatctgaacggcagagactctctggtgaattcgggcgtcgccatggcaaccaacaaggacgacgaggaccgcttcttcccatccagcggcatcctcatgtttggcaagcagggagctggaaaagacaacgtggactatagcaacgtgatgctaaccagcgaggaagaaatcaagaccaccaaccccgtggccacagaacagtatggcgtggtggctgataacctacagcagcaaaacaccgctcctattgtgggggccgtcaacagccagggagccttacctggcatggtctggcagaaccgggacgtgtacctgcagggtcctatttgggccaagattcctcacacagatggcaactttcacccgtctcctttaatgggcggctttggacttaaacatccgcctcctcagatcctcatcaaaaacactcctgttcctgcggatcctccaacagcgttcaaccaggccaagctgaattctttcatcacgcagtacagcaccggacaagtcagcgtggagatcgagtgggagctgcagaaggagaacagcaagcgctggaacccagagattcagtatacttccaactactacaaatctacaaatgtggactttgctgttaatactgagggtgtttactctgagcctcgccccattggcactcgttaccccacccgtaatctgtaa

SEQ ID NO: 2854 - protein, 734 aa, Artificial Sequence; identical to SEQ ID NO: 2679
  Synthetic polypeptide

SEQ ID NO: 2855 - DNA, 2214 bp, Artificial Sequence
  Synthetic polynucleotide
atggctgctgacggttatcttccagattggctcgaggacaacctctctgagggcattcgcgagtggtgggacctgaaacctggagccccgaaacccaaagccaaccagcagaagcaggacgacggccggggtctggtgcttcctggctacaagtacctcggacccttcaacggactcgacaagggggagcccgtcaacgcggcggacgcagcggccctcgagcacgacaaggcctacgaccagcagctcaaagcgggtgacaatccgtacctgcggtataaccacgccgacgccgagtttcaggagcgtctgcaagaagatacgtcttttgggggcaacctcgggcgagcagtcttccaggccaagaagcgggttctcgaacctctcggtctggttgaggaagctgctaagacggctcctggaaagaagagaccggtagaaccgtcacctcagcgttcccccgactcctccacgggcatcggcaagaaaggccagcagcccgctagaaagagactgaactttgggcagactggcgactcagagtcagtccccgaccctcaacctctcggagaaccaccagcaggcccctctggtctgggatctggtacaatggctgcaggcggtggcgctccaatggcagacaataacgaaggcgccgacggagtgggtaatgcctcaggaaattggcattgcgattccacatggctgggcgacagagtcatcaccaccagcacccgaacctgggctttgcccacctacaacaaccacctctacaagcaaatctccagtcagtcagcaggtagcaccaacgacaacgtctacttcggctacagcaccccctgggggtattttgacttcaacagattccactgtcacttctcaccacgtgactggcagcgactcatcaacaacaactggggattccggcccaagaagctcaacttcaagctcttcaacatccaagtcaaggaggtcacgacgaatgacggcgtcacgaccatcgctaataaccttaccagcacggttcaggtcttttcggactcggagtaccagctgccgtacgtcctcggctctgcccaccagggctgcctgcctccgttcccggcggacgtcttcatgattcctcagtacggctacctgactctgaacaatggcagccaatcggtgggacgttcatccttctactgcctggaatacttcccttctcaggtgctgagaacgggtaacaacttcaccttcagttacaccttcgaggacgtgcctttccacagcagctacgcgcacagccagagcctagaccggctgatgaatcccctcatcgaccagtacctgtattacctggctagaacacagagtaacccaggaggcacatctggcaatcgggaactgcagttttaccagggcgggccttccaccatggccgaacaagccaagaactggttacctggaccttgcttccggcaacaaagagtttccaaaacactggatcaaaacaacaacagcaactttgcttggactggtgccaccaaatatcacctgaacggcagaaactcattggtgaatcctggtgtcgccatggcaactcacaaggacgacgaggaccgctttttcccatccagcggagtcctgatttttggaaaaactggagcaaccaacaagactacattggaaaacgtgttaatgacaaatgaagaagaaattcgtcctactaatcctgtggccacagaagaatacgggatagtcagcagcaatttacaagcggccaatactgcagcccagacacaagttgtcaacaaccagggagccttacctggcatggtctggcagaaccgggacgtgtacctgcagggtcccatctgggccaaaattcctcacacagacggcaactttcacccgtctccgctgatgggcggctttggactgaagcatccgcctcctcagatcctgatcaaaaacactcctgttcctgctaatcccccggaggtgtttacgcctgccaagtttgcttctttcatcacacagtacagcaccggccaggtcagcgtggagatcgagtgggagctgcagaaggagaacagcaagcgctggaacccagagattcagtatacctccaattttgacaaacagactggtgtggactttgccgttgacagccagggtgtttattctgagcctcgccccattggtactcgttacctcacccgtaatctgtaa

SEQ ID NO: 2856 - protein, 737 aa, Artificial Sequence
  Synthetic polypeptide
MAADGYLPDWLEDNLSEGIREWWDLKPGAPKPKANQQKQDDGRGLVLPGYKYLGPFNGLDKGEPVNAADAAALEHDKAYDQQLKAGDNPYLRYNHADAEFQERLQEDTSFGGNLGRAVFQAKKRVLEPLGLVEEAAKTAPGKKRPVEPSPQRSPDSSTGIGKKGQQPARKRLNFGQTGDSESVPDPQPLGEPPAGPSGLGSGTMAAGGGAPMADNNEGADGVGNASGNWHCDSTWLGDRVITTSTRTWALPTYNNHLYKQISSQSAGSTNDNVYFGYSTPWGYFDFNRFHCHFSPRDWQRLINNNWGFRPKKLNFKLFNIQVKEVTTNDGVTTIANNLTSTVQVFSDSEYQLPYVLGSAHQGCLPPFPADVFMIPQYGYLTLNNGSQSVGRSSFYCLEYFPSQVLRTGNNFTFSYTFEDVPFHSSYAHSQSLDRLMNPLIDQYLYYLARTQSNPGGTSGNRELQFYQGGPSTMAEQAKNWLPGPCFRQQRVSKTLDQNNNSNFAWTGATKYHLNGRNSLVNPGVAMATHKDDEDRFFPSSGVLIFGKTGATNKTTLENVLMTNEEEIRPTNPVATEEYGIVSSNLQAANTAAQTQVVNNQGALPGMVWQNRDVYLQGPIWAKIPHTDGNFHPSPLMGGFGLKHPPPQILIKNTPVPANPPEVFTPAKFASFITQYSTGQVSVEIEWELQKENSKRWNPEIQYTSNFDKQTGVDFAVDSQGVYSEPRPIGTRYLTRNL

SEQ ID NO: 2857 - DNA, 2214 bp, Artificial Sequence
  Synthetic polynucleotide
atggctgccgatggttatcttccagattggctcgaggacaacctctctgagggcattcgcgagtggtgggacctgaaacctggagccccgaaacccaaagccaaccagcaaaagcaggacgacggccggggtctggtgcttcctggctacaagtacctcggacccttcaacggactcgacaagggggagcccgtcaacgcggcggacgcagcggccctcgagcacgacaaggcctacgaccagcagctcaaagcgggtgacaatccgtacctgcggtataatcacgccgacgccgagtttcaggagcgtctgcaagaagatacgtcttttgggggcaacctcgggcgagcagtcttccaggccaagaagcgggttctcgaacctctcggtctggttgaggaaggcgctaagacggctcctggaaagaagagaccggtagagccgtcaccacagcgttcccccgactcctccacgggcatcggcaagaaaggccagcagcccgccagaaagagactcaatttcggtcagactggcgactcagagtcagtccccgaccctcaacctatcggagaacctccagcagcgccctctagtgtgggatctggtacaatggctgcaggcggtggcgcaccaatggcagacaataacgaaggtgccgacggagtgggtagttcctcgggaaattggcattgcgattccacacggctgggcgacagagtcatcaccaccagcacccggacctgggctttgcccacctacaacaaccacctctacaagcaaatctccagtcagtcagcaggtagcaccaacgacaacgtctacttcggctacagcaccccctgggggtattttgacttcaacagattccactgtcacttctcaccacgtgactggcagcggctcatcaacaacaactggggattccggcccaagaagctcaacttcaagctgttcaacatccaggtcaaggaggtcacaacgaatgacggcgtcacgaccatcgccaataaccttaccagcacggttcaggtcttttcggactcggaataccagctgccctacgtcctcggctccgcacaccagggctgcctgcctccgttcccggcggacgtcttcatgattccccagtacggctacctgactctgaacaatggcagccaatcggtgggtcgttcctctttctactgcctggaatatttcccttctcaaatgctgagaacgggcaacaacttcaccttcagctacaccttcgaggacgttcccttccacagcagctacgcacacagccagagcctggaccggctgatgaatcctcttatcgaccagtacctgtattacctggccagaacacagagcaacgcaggaggcacagctggcaatcgggaactgcagttttatcagggcgggcctaccaccatggccgaacaagccaaaaactggctgcctggaccttgcttccggcaacgaagagtctccaagacgctggatcaaaacaacaacagcaactttgcttggactggtgccaccaaataccatctaaatggaagaaattcattggttaatcccggtgtcgccatggcaacccacaaggacgacgaggaacgcttcttcccttcgagcggagtcctgatttttggaaaaactggagcagctaataagactacactggaaaatgtgttaatgacaaatgaagaggaaattcgtcctaccaacccggtagccaccgaggaatacgggactgttagcagcaacctgcaggcggctaacactgcagcccagacacaagttgtcaacaaccagggagccttacctggtatggtctggcagaaccgggacgtgtacctgcagggtcccatctgggccaagattcctcacacggacggcaactttcacccgtctccgctgatgggcggctttggactgaagcatccgcctcctcagatcctgatcaaaaacactcctgttcctgctaatcccccggaggtgtttacgcctgccaagtttgcttctttcatcacacagtacagcaccggccaggtcagcgtggagatcgagtgggagctgcagaaggagaacagcaagcgctggaacccagagattcagtatacctccaattttgacaaacagactggtgtggactttgccgttgacagccagggtgtttattctgagcctcgccccattggtactcgttacctcacccgtaatctgtaa

SEQ ID NO: 2858 - protein, 737 aa, Artificial Sequence
  Synthetic polypeptide
MAADGYLPDWLEDNLSEGIREWWDLKPGAPKPKANQQKQDDGRGLVLPGYKYLGPFNGLDKGEPVNAADAAALEHDKAYDQQLKAGDNPYLRYNHADAEFQERLQEDTSFGGNLGRAVFQAKKRVLEPLGLVEEGAKTAPGKKRPVEPSPQRSPDSSTGIGKKGQQPARKRLNFGQTGDSESVPDPQPIGEPPAAPSSVGSGTMAAGGGAPMADNNEGADGVGSSSGNWHCDSTRLGDRVITTSTRTWALPTYNNHLYKQISSQSAGSTNDNVYFGYSTPWGYFDFNRFHCHFSPRDWQRLINNNWGFRPKKLNFKLFNIQVKEVTTNDGVTTIANNLTSTVQVFSDSEYQLPYVLGSAHQGCLPPFPADVFMIPQYGYLTLNNGSQSVGRSSFYCLEYFPSQMLRTGNNFTFSYTFEDVPFHSSYAHSQSLDRLMNPLIDQYLYYLARTQSNAGGTAGNRELQFYQGGPTTMAEQAKNWLPGPCFRQRRVSKTLDQNNNSNFAWTGATKYHLNGRNSLVNPGVAMATHKDDEERFFPSSGVLIFGKTGAANKTTLENVLMTNEEEIRPTNPVATEEYGTVSSNLQAANTAAQTQVVNNQGALPGMVWQNRDVYLQGPIWAKIPHTDGNFHPSPLMGGFGLKHPPPQILIKNTPVPANPPEVFTPAKFASFITQYSTGQVSVEIEWELQKENSKRWNPEIQYTSNFDKQTGVDFAVDSQGVYSEPRPIGTRYLTRNL

SEQ ID NO: 2859 - DNA, 2208 bp, Artificial Sequence
  Synthetic polynucleotide
atggctgccgatggttatcttccagattggctcgaggacactctctctgaaggaataagacagtggtggaagctcaaacctggcccaccaccaccaaagcccgcagagcggcataaggacgacagcaggggtcttgtgcttcctgggtacaagtacctcggacccttcaacggactcgacaagggggagccggtcaacgaggcagacgccgcggccctcgagcacgacaaggcctacgaccggcagctcgacagcggagacaacccgtacctcaagtacaaccacgccgacgcggagtttcaggagcgtcttaaagaagatacgtcttttgggggcaacctcggacgagcagtcttccaggcgaaaaagagggttcttgaacctctgggcctggttgaggaacctgttaagacggctccgggaaaaaagaggccggtagagcactctcctgcggagccagactcctcctcgggaaccggaaaagcgggccagcagcctgcaagaaaaagattgaattttggtcagactggagacgcagactccgtacctgacccccagcctctcggacagccaccagcagccccctctggtttgggatctactacaatggctacaggcagtggcgcaccaatggcagacaataacgagggtgccgatggagtgggtaattcttcaggaaattggcattgcgattcccaatggctgggcgacagagtcatcaccaccagcacccgaacctgggcccagcccacctacaacaaccacctctacaagcaaatctcaagccaatcaggagcctcaaacgacaaccactactttggctacagcaccccttgggggtattttgacttcaacagattccactgccacttttcaccacgtgactggcaaagactcatcaacaacaactggggattccgacccaagagactcaacttcaagctctttaacattcaagtcaaagaggtcacgcagaatgacggtacgacgacgattgccaataaccttaccagcacggttcaggtgtttactgactcggagtaccagctcccgtacgtcctcgggtcggcgcatcaaggatgcctcccgccgtttccagcggacgtcttcatggtcccacagtatggatacctcaccctgaacaacgggagtcaggcggtaggacgctcttccttttactgcctggagtactttccttctcagatgcttcgtactggaaacaactttcagttcagctacacctttgaagacgttcctttccacagcagctacgctcacagccagagtctggatcggctgatgaatcctctgatcgaccagtacctgtattatctgaacaaaacacaatcaaatagtggagctcttcagcagtctcggctactgtttagtcaagctggacccaccagcatgtctcttcaagctaaaaactggctacctggaccttgctacagacagcagcgtctgtcaaagcaggcaaacgacaacaacaacagcaactttccctggactgcggctacaaagtaccacctaaatggccgggactcgttggttaatccaggaccagctatggccagtcacaaagacgatgaagaaaagtttttccccatgcatggaaccctgatatttggtaaacaaggaacaaatgctaacgacgcggatttggacaatgtcatgattacagatgaagaagaaatccgcaccaccaatcccgtggctacggagcagtacggatatgtgtcaaataatttgcaaaactcaaatactggtccaactactggaactgtcaatcaccgaggagcgttacctggcatggtgtggcaggatcgagacgtgtacctgcagggacccatttgggccaagattcctcacaccgatggacactttcatccttctccactgatgggaggttttgggctcaaacacccgcctcctcagatcatgatcaaaaacactcccgttccagccaatcctcccacaaacttcagttctgccaagtttgcttctttcatcacacagtattccacggggcaggtcagcgtggagatcgagtgggagctgcagaaagagaacagcaaacgctggaatcccgaaattcagtacacttccaactacaacaaatctgttaatgtggactttactgtggacactaatggcgtgtattcagagcctcgccccattggcaccagatacctgactcgtaatctgtaa

SEQ ID NO: 2860 - protein, 735 aa, Artificial Sequence
  Synthetic polypeptide
MAADGYLPDWLEDTLSEGIRQWWKLKPGPPPPKPAERHKDDSRGLVLPGYKYLGPFNGLDKGEPVNEADAAALEHDKAYDRQLDSGDNPYLKYNHADAEFQERLKEDTSFGGNLGRAVFQAKKRVLEPLGLVEEPVKTAPGKKRPVEHSPAEPDSSSGTGKAGQQPARKRLNFGQTGDADSVPDPQPLGQPPAAPSGLGSTTMATGSGAPMADNNEGADGVGNSSGNWHCDSQWLGDRVITTSTRTWAQPTYNNHLYKQISSQSGASNDNHYFGYSTPWGYFDFNRFHCHFSPRDWQRLINNNWGFRPKRLNFKLFNIQVKEVTQNDGTTTIANNLTSTVQVFTDSEYQLPYVLGSAHQGCLPPFPADVFMVPQYGYLTLNNGSQAVGRSSFYCLEYFPSQMLRTGNNFQFSYTFEDVPFHSSYAHSQSLDRLMNPLIDQYLYYLNKTQSNSGALQQSRLLFSQAGPTSMSLQAKNWLPGPCYRQQRLSKQANDNNNSNFPWTAATKYHLNGRDSLVNPGPAMASHKDDEEKFFPMHGTLIFGKQGTNANDADLDNVMITDEEEIRTTNPVATEQYGYVSNNLQNSNTGPTTGTVNHRGALPGMVWQDRDVYLQGPIWAKIPHTDGHFHPSPLMGGFGLKHPPPQIMIKNTPVPANPPTNFSSAKFASFITQYSTGQVSVEIEWELQKENSKRWNPEIQYTSNYNKSVNVDFTVDTNGVYSEPRPIGTRYLTRNL

SEQ ID NO: 2861 - DNA, 2217 bp, Artificial Sequence
  Synthetic polynucleotide
atggctgccgatggttatcttccagattggctcgaggacaacctctctgagggcattcgcgagtggtgggcgctgaaacctggagccccgaagcccaaagccaaccagcaaaagcaggacgacggccggggtctggtgcttcctggctacaagtacctcggacccttcaacggactcgacaagggggagcccgtcaacgcggcggacgcagcggccctcgagcacgacaaggcctacgaccagcagctgcaggcgggtgacaatccgtacctgcggtataatcacgccgacgccgagtttcaggagcgtctgcaagaagatacgtcttttgggggcaacctcgggcgagcagtcttccaggccaagaagcgggttctcgaacctctcggtctggttgaggaaggcgctaagacggctcctggaaagaagagaccggtagagccgtcaccacagcgttcccccgactcctccacgggcatcggcaagaaaggccagcagcccgccagaaagagactcaatttcggtcagactggcgactcagagtcagtccccgaccctcaacctatcggagaacctccagcagcgccctctagtgtgggatctggtacaatggctgcaggcggtggcgcgccaatggcagacaataacgaaggtgccgacggagtgggtagttcctcgggaaattggcattgcgattccacatggctgggcgacagagtcatcaccaccagcacccgaacctgggccctgcccacctacaacaaccacctctacaagcaaacctccaacgggacctcgggaggcagcaccaacgacaacacctactttggctacagcaccccctgggggtattttgactttaacagattccactgccacttctcaccacgtgactggcagcgactcatcaacaacaactggggattccggcccaagagactcagcttcaagctcttcaacatccaggtcaaagaggtcacgcagaatgaaggcaccaagaccatcgccaataacctcaccagcaccatccaggtgtttacggactcggaataccagctgccgtacgtcctcggctctgcccaccagggctgcctgcctccgttcccggcggacgtcttcatgattcctcagtacggctacctgactctcaacaacggtagtcaggccgtgggacgttcctccttctactgcctggagtacttcccctctcagatgctgagaacgggcaacaacttttccttcagctacactttcgaggacgtgcctttccacagcagctacgcgcacagccagagtttggacaggctgatgaatcctctcatcgaccagtacctgtactacctgtcaagaacccagtctacgggaggcacagcgggaacccagcagttgctgttttctcaggccgggcctagcaacatgtcggctcaggccagaaactggctgcctggaccctgctacagacagcagcgcgtctccacgacactgtcgcaaaacaacaacagcaactttgcctggactggtgccaccaagtatcatctgaacggcagagactctctggtgaatccgggcgtcgccatggcaaccaacaaggacgacgaggaccgcttcttcccatccagcggcatcctcatgtttggcaagcagggagctggaaaagacaacgtggactatagcaacgtgatgctaaccagcgaggaagaaatcaagaccaccaaccccgtggccacagaacagtatggcgtggtggctgataacctacagcagcaaaacaccgctcctattgtgggggccgtcaacagccagggagccttacctggcatggtctggcagaaccgggacgtgtacctgcagggtcctatttgggccaagattcctcacacagatggcaactttcacccgtctcctttaatgggcggctttggacttaaacatccgcctcctcagatcctcatcaaaaacactcctgttcctgcggatcctccaacagcgttcaaccaggccaagctgaattctttcatcacgcagtacagcaccggacaagtcagcgcggagatcgagtgggagctgcagaaggagaacagcaagcgctggaacccagagattcagtatacttccaactactacaaatctacaaatgtggactttgctgttaatactgagggtgtttactctgagcctcgccccattggcactcgttacctcacccgtaatctgtaa

SEQ ID NO: 2862 - protein, 738 aa, Artificial Sequence
  Synthetic polypeptide
MAADGYLPDWLEDNLSEGIREWWALKPGAPKPKANQQKQDDGRGLVLPGYKYLGPFNGLDKGEPVNAADAAALEHDKAYDQQLQAGDNPYLRYNHADAEFQERLQEDTSFGGNLGRAVFQAKKRVLEPLGLVEEGAKTAPGKKRPVEPSPQRSPDSSTGIGKKGQQPARKRLNFGQTGDSESVPDPQPIGEPPAAPSSVGSGTMAAGGGAPMADNNEGADGVGSSSGNWHCDSTWLGDRVITTSTRTWALPTYNNHLYKQTSNGTSGGSTNDNTYFGYSTPWGYFDFNRFHCHFSPRDWQRLINNNWGFRPKRLSFKLFNIQVKEVTQNEGTKTIANNLTSTIQVFTDSEYQLPYVLGSAHQGCLPPFPADVFMIPQYGYLTLNNGSQAVGRSSFYCLEYFPSQMLRTGNNFSFSYTFEDVPFHSSYAHSQSLDRLMNPLIDQYLYYLSRTQSTGGTAGTQQLLFSQAGPSNMSAQARNWLPGPCYRQQRVSTTLSQNNNSNFAWTGATKYHLNGRDSLVNPGVAMATNKDDEDRFFPSSGILMFGKQGAGKDNVDYSNVMLTSEEEIKTTNPVATEQYGVVADNLQQQNTAPIVGAVNSQGALPGMVWQNRDVYLQGPIWAKIPHTDGNFHPSPLMGGFGLKHPPPQILIKNTPVPADPPTAFNQAKLNSFITQYSTGQVSAEIEWELQKENSKRWNPEIQYTSNYYKSTNVDFAVNTEGVYSEPRPIGTRYLTRNL

SEQ ID NO: 2863 - DNA, 2217 bp, Artificial Sequence
  Synthetic polynucleotide
atggctgctgacggttatcttccagattggctcgaggacaacctctctgagggcattcgcgagtggtgggacctgaaacctggagcccccaagcccaaggccaaccagcagaagcaggacgacggccggggtctggtgcttcctggctacaagtacctcggacccttcaacggactcgacaagggggagcccgtcaacgcggcggacgcagcggccctcgagcacgacaaggcctacgaccagcagctcaaagcgggtgacaatccgtacctgcggtataatcacgccgacgccgagtttcaggagcgtctgcaagaagatacgtcttttgggggcaacctcgggcgagcagtcttccaggccaagaagcgggttctcgaacctctcggtctggttgaggaagctgctaagacggctcctggaaagaagagaccggtagaaccgtcacctcagcgttcccccgactcctccacgggcatcggcaagaaaggccagcagcccgctagaaagagactgaactttgggcagactggcgactcagagtcagtccccgaccctcaaccaatcggagaacctccagcagcgccctctagtgtgggatctggtacaatggccgcaggcggtggcgcaccaatggcagacaataacgaaggtgccgacggagtgggtagttcctcgggaaattggcattgcgattccacatggctgggcgacagagtcatcaccaccagcacccgaacctgggccctgcccacctacaacaaccacctctacaagcaaatctccaacgggacctcgggaggcagcaccaacgacaacacctactttggctacagcaccccctgggggtattttgactttaacagattccactgccacttctcaccacgtgactggcagcgactcatcaacaacaactggggattccggcccaagagactcagcttcaagctcttcaacatccaggtcaaagaggtcacgcagaatgaaggcaccaagaccatcgccaataacctcaccagcaccatccaggtgtttacggactcggaataccagctgccgtacgtcctcggctctgcccaccagggctgcctgcctccgttcccggcggacgtcttcatgattcctcagtacggctacctgactctcaacaacggtagtcaggccgtgggacgttcctccttctactgcctggagtacttcccctctcagatgctgagaacgggcaacaacttttccttcagctacactttcgaggacgtgcctttccacagcagctacgcgcacagccagagtttggacaggctgatgaatcctctcatcgaccagtacctgtactacctgtcaagaacccagtctacgggaggcacagcgggaacccagcagctgctgttttctcaggccgggcctagcaacatgtcggctcaggccagaaactggctgcctggaccctgctacagacagcagcgcgtctccacgacactgtcgcaaaacaacaacagcaactttgcctggactggtgccaccaagtatcatctgaacggcagagactctctggtgaatccgggcgtcgccatggcaaccaacaaggacgacgaggaccgcttcttcccatccagcggcatcctcatgtttggcaagcagggagctggaaaagacaacgtggactatagcaacgtgatgctaaccagcgaggaagaaatcaagaccaccaaccccgtggccacagaacagtatggcgtggtggctgataacctacagcagcaaaacaccgctcctattgtgggggccgtcaacagccagggagccttacctggcatggtctggcagaaccgggacgtgtacctgcagggtcctatttgggccaagattcctcacacagatggcaactttcacccgtctcctttaatgggcggctttggacttaaacatccgcctcctcagatcctcatcaaaagcactcctgttcctgcggatcctccaacagcgttcaaccaggccaagctgaattctttcatcacgcagtacagcaccggacaagtcagcgtggagatcgagtgggagctgcagaaggagaacagcaagtgctggaacccagagattcagtatacttccaactactacaaatctacaaatgtggactttgctgttaatactgagggtgtttactctgagcctcgccccattggcactcgttacctcacccgtaatctgtaa

SEQ ID NO: 2864 - protein, 738 aa, Artificial Sequence
  Synthetic polypeptide
MAADGYLPDWLEDNLSEGIREWWDLKPGAPKPKANQQKQDDGRGLVLPGYKYLGPFNGLDKGEPVNAADAAALEHDKAYDQQLKAGDNPYLRYNHADAEFQERLQEDTSFGGNLGRAVFQAKKRVLEPLGLVEEAAKTAPGKKRPVEPSPQRSPDSSTGIGKKGQQPARKRLNFGQTGDSESVPDPQPIGEPPAAPSSVGSGTMAAGGGAPMADNNEGADGVGSSSGNWHCDSTWLGDRVITTSTRTWALPTYNNHLYKQISNGTSGGSTNDNTYFGYSTPWGYFDFNRFHCHFSPRDWQRLINNNWGFRPKRLSFKLFNIQVKEVTQNEGTKTIANNLTSTIQVFTDSEYQLPYVLGSAHQGCLPPFPADVFMIPQYGYLTLNNGSQAVGRSSFYCLEYFPSQMLRTGNNFSFSYTFEDVPFHSSYAHSQSLDRLMNPLIDQYLYYLSRTQSTGGTAGTQQLLFSQAGPSNMSAQARNWLPGPCYRQQRVSTTLSQNNNSNFAWTGATKYHLNGRDSLVNPGVAMATNKDDEDRFFPSSGILMFGKQGAGKDNVDYSNVMLTSEEEIKTTNPVATEQYGVVADNLQQQNTAPIVGAVNSQGALPGMVWQNRDVYLQGPIWAKIPHTDGNFHPSPLMGGFGLKHPPPQILIKSTPVPADPPTAFNQAKLNSFITQYSTGQVSVEIEWELQKENSKCWNPEIQYTSNYYKSTNVDFAVNTEGVYSEPRPIGTRYLTRNL

SEQ ID NO: 2865 - protein, 738 aa, Artificial Sequence
  Synthetic polypeptide
MAADGYLPDWLEDNLSEGIREWWDLKPGAPKPKANQQKQDDGRGLVLPGYKYLGPFNGLDKGEPVNAADAAALEHDKAYDQQLKAGDNPYLRYNHADAEFQERLQEDTSFGGNLGRAVFQAKKRVLEPLGLVEEAAKTAPGKKRPVEPSPQRSPDSSTGIGKKGQQPARKRLNFGQTGDSESVPDPQPIGEPPAAPSSVGSGTMAAGGGAPMADNNEGADGVGSSSGNWHCDSTWLGDRVITTSTRTWALPTYNNHLYKQISNGTSGGSTNDNTYFGYSTPWGYFDFNRFHCHFSPRDWQRLINNNWGFRPKRLSFKLFNIQVKEVTQNEGTKTIANNLTSTIQVFTDSEYQLPYVLGSAHQGCLPPFPADVFMIPQYGYLTLNNGSQAVGRSSFYCLEYFPSQMLRTGNNFSFSYTFEDVPFHSSYAHSQSLDRLMNPLIDQYLYYLSRTQSTGGTAGTQQLLFSQAGPSNMSAQARNWLPGPCYRQQRVSTTLSQNNNSNFAWTGATKYHLNGRDSLVNPGVAMATNKDDEDRFFPSSGILMFGKQGAGKDNVDYSNVMLTSEEEIKTTNPVATEQYGVVADNLQQQNTAPIVGAVNSQGALPGMVWQNRDVYLQGPIWAKIPHTDGNFHPSPLMGGFGLKHPPPQILIKSTPVPADPPTAFNQAKLNSFITQYSTGQVSVEIEWELQKENSKRWNPEIQYTSNYYKSTNVDFAVNTEGVYSEPRPIGTRYLTRNL

SEQ ID NO: 2866 - DNA, 2217 bp, Artificial Sequence
  Synthetic polynucleotide
atggctgctgacggttatcttccagattggctcgaggacaacctctctgagggcattcgcgagtggtgggacctgaaacctggagcccccaagcccaaggccaaccagcagaagcaggacgacggccggggtctggtgcttcctggctacaagtacctcggacccttcaacggactcgacaagggggagcccgtcaacgcggcggacgcagcggccctcgagcacgacaaggcctacgaccagcagctcaaagcgggtgacaatccgtacctgcggtataaccacgccgacgccgagtttcaggagcgtctgcaagaagatacgtcttttgggggcaacctcgggcgagcagtcttccaggccaagaagcgggttctcgaacctctcggtctggttgaggaagctgctaagacggctcctggaaagaagagaccggtagaaccgtcacctcagcgttcccccgactcctccacgggcatcggcaagaaaggccagcagcccgctagaaagagactgaactttgggcagactggcgactcagagtcagtccccgaccctcaaccaatcggagaaccaccagcaggcccctctggtctgggatctggtacaatggctgcaggcggtggcgcaccaatggctgacaataacgagggcgccgacggagtgggtaatgcctcaggaaattggcattgcgattccacatggctgggcgacagagtcatcaccaccagcacccgaacctgggctttgcccacctacaacaaccacctctacaagcaaatctccagtcagtcagcaggtagcaccaacgacaacgtctacttcggctacagcaccccctgggggtattttgacttcaacagattccactgtcacttctcaccacgtgactggcagcggctcatcaacaacaactggggattccggcccaagaagctcaacttcaagctgttcaacatccaggtcaaggaggtcacaacgaatgacggcgtcacgaccatcgccaataaccctaccagcacggttcaggtcttttcggactcggaataccagctgccctacgtcctcggctccgcacaccagggctgcctgcctccgttcccggcggacgtcttcatgattccccagtacggctacctgactctgaacaatggcagccaatcggtgggtcgttcctctttctactgcctggaatatttcccttctcaaatgctgagaacgggcaacaacttcaccttcagctacaccttcgaggacgttcccttccacagcagctacgcacacagccagagcctggaccggctgatgaatcctcttatcgaccagtacctgtattacctggccagaacacagagcaacgcaggaggcacagctggcaatcgggaactgcagttttatcagggcgggcctaccaccatggccgaacaagccaaaaactggctgcctggaccctgctacagacagcagcgcgtctccacgacactgtcgcaaaacaacaacagcaactttgcctggactggtgccaccaagtatcatctgaacggcagagactctctggtgaatccgggcgtcgccatggcaaccaacaaggacgacgaggaccgcttcttcccatccagcggcatcctcatgtttggcaagcagggagctggaaaagacaacgtggactatagcaacgtgatgctaaccagcgaggaagaaatcaagaccaccaaccccgtggccacagaacagtatggcgtggtggctgataacctacagcagcaaaacaccgctcctattgtgggggccgtcaacagccagggagccttacctggcatggtctggcagaaccgggacgtgtacctgcagggtcctatttgggccaagattcctcacacagatggcaactttcacccgtctcctttaatgggcggctttggacttaaacatccgcctcctcagatcctcatcaaaaacactcctgttcctgcggatcctccaacagcgttcaaccaggccaagctgaattctttcatcacgcagtacagcaccggacaagtcagcgtggagatcgagtgggagctgcagaaggagaacagcaagcgctggaacccagagattcagtatacttccaactactacaaatctacaaatgtggactttgctgttaatactgagggtgtttactctgagcctcgccccattggcactcgttacctcacccgtaatctgtaa

SEQ ID NO: 2867 - protein, 738 aa, Artificial Sequence
  Synthetic polypeptide
MAADGYLPDWLEDNLSEGIREWWDLKPGAPKPKANQQKQDDGRGLVLPGYKYLGPFNGLDKGEPVNAADAAALEHDKAYDQQLKAGDNPYLRYNHADAEFQERLQEDTSFGGNLGRAVFQAKKRVLEPLGLVEEAAKTAPGKKRPVEPSPQRSPDSSTGIGKKGQQPARKRLNFGQTGDSESVPDPQPIGEPPAGPSGLGSGTMAAGGGAPMADNNEGADGVGNASGNWHCDSTWLGDRVITTSTRTWALPTYNNHLYKQISSQSAGSTNDNVYFGYSTPWGYFDFNRFHCHFSPRDWQRLINNNWGFRPKKLNFKLFNIQVKEVTTNDGVTTIANNPTSTVQVFSDSEYQLPYVLGSAHQGCLPPFPADVFMIPQYGYLTLNNGSQSVGRSSFYCLEYFPSQMLRTGNNFTFSYTFEDVPFHSSYAHSQSLDRLMNPLIDQYLYYLARTQSNAGGTAGNRELQFYQGGPTTMAEQAKNWLPGPCYRQQRVSTTLSQNNNSNFAWTGATKYHLNGRDSLVNPGVAMATNKDDEDRFFPSSGILMFGKQGAGKDNVDYSNVMLTSEEEIKTTNPVATEQYGVVADNLQQQNTAPIVGAVNSQGALPGMVWQNRDVYLQGPIWAKIPHTDGNFHPSPLMGGFGLKHPPPQILIKNTPVPADPPTAFNQAKLNSFITQYSTGQVSVEIEWELQKENSKRWNPEIQYTSNYYKSTNVDFAVNTEGVYSEPRPIGTRYLTRNL

SEQ ID NO: 2868 - DNA, 2208 bp, Artificial Sequence
  Synthetic polynucleotide
atggctgccgatggttatcttccagattggctcgaggacaacctctctgagggcattcacgagtggtgggacccgaaacctggagccccgaaacccaaagccaaccagcaaaagcaggacgacggccggggtctggtgcttcctggctacaagtacctcggacccttcaacggactcgacaagggggagcccgtcaacgcggcggacgcagcggccctcgagcacgacaaggcctacgaccagcagctcaaagcgggtgacaatccgtacctgcggtataatcacgccgacgccgagtttcaggagcgtctgcaagaagatacgtcttttgggggcaacctcgggcgagcagtcttccaggccaagaagcgggttctcgaacctctcggtctggttgaggaaggcgctaagacggctcctggaaagaagagaccggtagagccgtcaccacagcgttcccccgactcctccacgggcatcggcaagaaaggccagcagcccgccagaaagagactcaatttcggtcagactggcgactcagagtcagtccccgaccctcaacctatcggagaacctccagcagcgccctctagtgtgggatctggtacaatggctgcaggcggtggcgcaccaatggcagacaataacgaaggtgccgacggagtgggtagttcctcgggaaattggcattgcgattccacatggctgggcgacagagtcatcaccaccagcacccgaacctgggccctgcccacccacaacaaccacctctacaagcaaatctccaacgggacctcgggaggcagcaccaacgacaacgtctacttcggctacagcaccccctgggggtattttgacttcaacagattccactgtcacttctcaccacgtgaccggcagcgactcatcaacaacaactggggattccggcccaagagactcagcttcaagctcttcaacatccaggtcaaagaggtcacgcagaatgaaggcaccaagaccatcgccaataacctcaccagcaccatccaggtgtttacggactcggaataccagctgccgtacgtcctcggctctgcccaccagggctgcctgcctccgttcccggcggacgtcttcatgattcctcagtacggctacctgactctcaacaacggtagtcaggccgtgggacgttcctccttctactgcctggagtacttcccctctcagatgctgagaacgggcaacaacttttccttcagctacactttcgaggacgtgcctttccacagcagctacgcgcacagccagagtttggacaggctgatgaatcctctcatcgaccagtacctgtactacctgtcaagaacccagtctacggaaggcacagcgggaacccagcagttgctgttttctcaggccgggcctagcaacatgtcggctcaggccagaaactggctgcctggaccctgctacagacagcagcgcgtctccacgacactgtcgcaaaacaacaacagcaactttgcctggactggtgccaccaagtatcatctgaacggcagagactctctggtgaatccgggcgtcgccatggcaacccacaaggacgacgaggaacgcttcttcccttcgagcggagtcctgatttttggaaaaactggagcagctaataagactacactggaaaatgtgttaatgacaaatgaagaggaaattcgtcctaccaacccggtagccaccgaggaatacgggactgttagcagcaacctgcaggcggctaacactgcagcccagacacaagttgtcaacaaccagggagccttacctggtatggtctggcagaaccgggacgtgtacctgcagggtcccatctgggccaagattcctcacacggacggcaactttcacccgtctccgctgatgggcggctttggactgaagcatcctcagatcctgatcaaaaacactcctgttcctgctaatcccccggaggtgtttacgcctgccaagtttgcttctttcatcacacagtacagcaccggccaggtcagcgtggagatcgagtgggagctgcagaaggagaacagcaagcgctggaacccagagattcagtatacctccaattttgacaaacagactggtgtggactttgccgttgacagccagggtgtttattctgagcctcgccccattggtactcgttacctcacccgtaatctgtaa

SEQ ID NO: 2869 - protein, 735 aa, Artificial Sequence
  Synthetic polypeptide
MAADGYLPDWLEDNLSEGIHEWWDPKPGAPKPKANQQKQDDGRGLVLPGYKYLGPFNGLDKGEPVNAADAAALEHDKAYDQQLKAGDNPYLRYNHADAEFQERLQEDTSFGGNLGRAVFQAKKRVLEPLGLVEEGAKTAPGKKRPVEPSPQRSPDSSTGIGKKGQQPARKRLNFGQTGDSESVPDPQPIGEPPAAPSSVGSGTMAAGGGAPMADNNEGADGVGSSSGNWHCDSTWLGDRVITTSTRTWALPTHNNHLYKQISNGTSGGSTNDNVYFGYSTPWGYFDFNRFHCHFSPRDRQRLINNNWGFRPKRLSFKLFNIQVKEVTQNEGTKTIANNLTSTIQVFTDSEYQLPYVLGSAHQGCLPPFPADVFMIPQYGYLTLNNGSQAVGRSSFYCLEYFPSQMLRTGNNFSFSYTFEDVPFHSSYAHSQSLDRLMNPLIDQYLYYLSRTQSTEGTAGTQQLLFSQAGPSNMSAQARNWLPGPCYRQQRVSTTLSQNNNSNFAWTGATKYHLNGRDSLVNPGVAMATHKDDEERFFPSSGVLIFGKTGAANKTTLENVLMTNEEEIRPTNPVATEEYGTVSSNLQAANTAAQTQVVNNQGALPGMVWQNRDVYLQGPIWAKIPHTDGNFHPSPLMGGFGLKHPQILIKNTPVPANPPEVFTPAKFASFITQYSTGQVSVEIEWELQKENSKRWNPEIQYTSNFDKQTGVDFAVDSQGVYSEPRPIGTRYLTRNL

SEQ ID NO: 2870 - protein, 738 aa, Artificial Sequence
  Synthetic polypeptide
MAADGYLPDWLEDNLSEGIREWWDLKPGAPKPKANQQKQDDGRGLVLPGYKYLGPFNGLDKGEPVNAADAAALEHDKAYDQQLKAGDNPYLRYNHADAEFQERLQEDTSFGGNLGRAVFQAKKRVLEPLGLVEEGAKTAPGKKRPVEPSPQRSPDSSTGIGKKGQQPARKRLNFGQTGDSESVPDPQPIGEPPAAPSSVGSGTMAAGGGAPMADNNEGADGVGSSSGNWHCDSTWLGDRVITTSTRTWALPTYNNHLYKQISNGTSGGSTNDNTYFGYSTPWGYFDFNRFHCHFSPRDWQRPINNNWGFRPKRLSFKLFNIQVKEVTQNEGTKTIANNLTSTIQVFTDSEYQLPYVLGSAHQGCLPPFPADVFMIPQYGYLTLNNGSQAVGRSSFYCLEYFPSQMLRTGNNFSFSYPFEDVPFHSSYAHSQSLDRLMNPLIDQYLYYLSRTQSTGGTAGTQQLLFSQAGPSNMSAQARNWLPGPCYRQQRVSTTLSQNNNSNFAWTGATKYHLNGRDSLVNPGVAMATNKDDEDRFFPSSGILMFGKQGAGKDNVDYSNVMLTSEEEIKTTNPVATEQYGVVADNLQQQDTAPIVGAVNSQGALPGMVWQNRDVYLQGPIWAKIPHTDGNFHPSPLMGGFGLKHPPPQVLIKNTPVPADPPTAFNQAKLNSFITQYSTGQVSVEIEWELQKENSKRWNPEIQYTSNYYKSTNVDFAVNTEGVYSEPRPIGTRYLTRNL

SEQ ID NO: 2871 - DNA, 2217 bp, Artificial Sequence
  Synthetic polynucleotide
atggctgccgatggttatcttccagattggctcgaggacaacctctctgagggcattcgcgagtggtgggacctgaaacctggagccccgaaacccaaggccaaccagcaaaagcaggacgacggccggggtctggtgcttcctggctacaagtacctcggacccttcaacggactcgacaagggggagcccgtcaacgcggcggacgcagcggccctcgagcacgacaaggcctacgaccagcagctcaaagcgggtgacaatccgtacctgcggtataatcacgccgacgccgagtttcaggagcgtctgcaagaagatacgtcttttgggggcaacctcgggcgagcagtcttccaggccaagaagcgggttctcgaacctctcggtctggttgaggaaggcgctaagacggctcctggaaagaagagaccggtagagccgtcaccacagcgttcccccgactcctccacgggcatcggcaagaaaggccagcagcccgccagaaagagactcaatttcggtcagactggcgactcagagtcagtccccgaccctcaacctatcggagaacctccagcagcgccctctagtgtgggatctggtacaatggctgcaggcggtggcgcaccaatggcagacaataacgaaggtgccgacggagtgggtagttcctcgggaaattggcattgcgattccacatggctgggcgacagagtcatcaccaccagcacccgaacctgggccctgcccacctacaacaaccacctctacaagcaaatctccaacgggacctcgggaggcagcaccaacgacaacacctactttggctacagcaccccctgggggtattttgactttaacagattccactgccacttctcaccacgtgactggcagcgacccatcaacaacaactggggattccggcccaagagactcagcttcaagctcttcaacatccaggtcaaagaggtcacgcagaatgaaggcaccaagaccatcgccaataacctcaccagcaccatccaggtgtttacggactcggaataccagctgccgtacgtcctcggctctgcccaccagggctgcctgcctccgttcccggcggacgtcttcatgattcctcagtacggctacctgactctcaacaacggtagtcaggccgtgggacgttcctccttctactgcctggagtacttcccctctcagatgctgagaacgggcaacaacttttccttcagctaccctttcgaggacgtgcctttccacagcagctacgcgcacagccagagtttggacaggctgatgaatcctctcatcgaccagtacctgtactacctgtcaagaacccagtctacgggaggcacagcgggaacccagcagttgctgttttctcaggccgggcctagcaacatgtcggctcaggccagaaactggctgcctggaccctgctacagacagcagcgcgtctccacgacactgtcgcaaaacaacaacagcaactttgcctggactggtgccaccaagtatcatctgaacggcagagactctctggtgaatccgggcgtcgccatggcaaccaacaaggacgacgaggaccgcttcttcccatccagcggcatcctcatgtttggcaagcagggagctggaaaagacaacgtggactatagcaacgtgatgctaaccagcgaggaagaaatcaagaccaccaaccccgtggccacagaacagtatggcgtggtggctgataacctacagcagcaagacaccgctcctattgtgggggccgtcaacagccagggagccttacctggcatggtctggcagaaccgggacgtgtacctgcagggtcctatttgggccaagattcctcacacagatggcaactttcacccgtctcctttaatgggcggctttggacttaaacatccgcctcctcaggtcctcatcaaaaacactcctgttcctgcggatcctccaacagcgttcaaccaggccaagctgaattctttcatcacgcagtacagcaccggacaagtcagcgtggagatcgagtgggagctgcagaaggagaacagcaagcgctggaacccagagattcagtatacttccaactactacaaatctacaaatgtggactttgctgttaatactgagggtgtttactctgagcctcgccccattggcactcgttacctcacccgtaatctgtaa

SEQ ID NO: 2872 - DNA, 2214 bp, Artificial Sequence
  Synthetic polynucleotide
atggctgctgacggttatcttccagattggctcgaggacaacctctctgagggcattcgcgagtggtgggacctgaaacctggagcccccaagcccaaggccaaccagcagaagcaggacgacggccggggtctggtgcttcctggctacaagtacctcggacccttcaacggactcgacaagggggagcccgtcaacgcggcggacgcagcggccctcgagcacgacaaggcctacgaccagcagctcaaagcgggtgacaatccgtacctgcggtataaccacgccgacgccgagttccaggagcgtctgcaagaagatacgtcttttgggggcaacctcgggcgagcagtcttccaggccaagaagcgggttctcgaacctctcggtctggctgaggaagctgctaagacggctcctggaaagaagagaccggtagaaccgtcacctcagcgttcccccgactcctccacgggcatcggcaagaaaggccagcagcccgctagaaagagactgaactttgggcagactggcgactcagagtcagtccccgaccctcaaccaatcggagagccaccagcaggcccctctggtctgggatctggtacaatggctgcaggcggtggcgcaccaatggctgacaataacaagggcgccgacggagtgggtaatgcctcaggaaattggcattgcgattccacatggctgggcgacagagtcatcaccaccagcacccgaacctgggctttgcccacctacaacaaccacctctacaagcaaatctccagtcagtcagcaggtagcaccaacgacaacgtctacttcggctacagcaccccctgggggtattttgacttcaacagattccactgtcacttctcaccacgtgactggcagcggctcatcaacaacaactggggattccggcccaagaagctcaacttcaagctgttcaacatccaggtcaaggaggtcacaacgggtgacggcgtcacgaccatcgccaataaccttaccagcacggttcaggtcttttcggactcggaataccagctgccctacgtcctcggctccgcacaccagggctgcctgcctccgttcccggcggacgtcttcatgattccccagtacggctacctgactctgaacaatgacagccaatcggtgggtcgttcctctttctactgcctggaatatttcccttctcaaatgctgagaacgggcaacaacttcaccttcagctacaccttcgaggacgttcccttccacagcagctacgcacacagccagagcctggaccggctgatgaatcctcttatcgaccagtacctgtattacctggccagaacacagagcaacgcaggaggcacagctggcaatcgggaactgcagttttatcagggcgggcctaccaccatggccgaacaagccaaaaactggctgcctggaccttgcttccggcaacaaagagtctccaagacgctggatcaaaacaacaacagcaactttgcttggactggtgccaccaaataccatctaaatggaagaaattcattggttaatcccggtgtcgccatggcaacccacaaggacgacgaggaacgcttcttcccttcgagcggagtcctgatttttggaaaaactggagcagctaataagactacactggaaaatgtgttaatgacaaatgaagaggaaattcgtcctaccaacccggtagccaccgaggaatacgggactgttagcagcaacctgcaggcggctaacactgcagcccagacacaagttgtcaacaaccagggagccttacctggtatggtctggcagaaccgggacgtgtacctgcagggtcccatctgggccaagattcctcacacggacggcaactttcacccgtctccgctgatgggcggctttggactgaagcatccgcctcctcagatcctgatcaaaaacactcctgttcctgctaatcccccggaggtgtttacgcctgccaagtttgcttctttcatcacacagtacagcaccggccaggtcagcgtggagatcgagtgggagctgcagaaggagaacagcaagcgctggaacccagagattcagtatacctccaattttgacaaacagactggtgtggactttgccgttgacagccagggtgtttattctgagcctcgccccattggtactcgttacctcacccgtaatctgtaa

SEQ ID NO: 2873 - protein, 737 aa, Artificial Sequence
  Synthetic polypeptide
MAADGYLPDWLEDNLSEGIREWWDLKPGAPKPKANQQKQDDGRGLVLPGYKYLGPFNGLDKGEPVNAADAAALEHDKAYDQQLKAGDNPYLRYNHADAEFQERLQEDTSFGGNLGRAVFQAKKRVLEPLGLAEEAAKTAPGKKRPVEPSPQRSPDSSTGIGKKGQQPARKRLNFGQTGDSESVPDPQPIGEPPAGPSGLGSGTMAAGGGAPMADNNKGADGVGNASGNWHCDSTWLGDRVITTSTRTWALPTYNNHLYKQISSQSAGSTNDNVYFGYSTPWGYFDFNRFHCHFSPRDWQRLINNNWGFRPKKLNFKLFNIQVKEVTTGDGVTTIANNLTSTVQVFSDSEYQLPYVLGSAHQGCLPPFPADVFMIPQYGYLTLNNDSQSVGRSSFYCLEYFPSQMLRTGNNFTFSYTFEDVPFHSSYAHSQSLDRLMNPLIDQYLYYLARTQSNAGGTAGNRELQFYQGGPTTMAEQAKNWLPGPCFRQQRVSKTLDQNNNSNFAWTGATKYHLNGRNSLVNPGVAMATHKDDEERFFPSSGVLIFGKTGAANKTTLENVLMTNEEEIRPTNPVATEEYGTVSSNLQAANTAAQTQVVNNQGALPGMVWQNRDVYLQGPIWAKIPHTDGNFHPSPLMGGFGLKHPPPQILIKNTPVPANPPEVFTPAKFASFITQYSTGQVSVEIEWELQKENSKRWNPEIQYTSNFDKQTGVDFAVDSQGVYSEPRPIGTRYLTRNL

SEQ ID NO: 2874 - DNA, 2217 bp, Artificial Sequence
  Synthetic polynucleotide
atggctgccgatggttatcttccagattggctcgaggacaacctctctgagggcattcgcgagtggtgggacctgaaacctggagccccgaaacccaaagccaaccagcaaaagcaggacgacggccggggtctggtgcttcctggctacaagtacctcggacccttcaacggactcgacaagggggagcccgtcaacgcggcggacgcagcggccctcgagcacgacaaggcctacgaccagcagctcaaagcgggtgacaatccgtacctgcggtataatcacgccgacgccgagtttcaggagcgtctgcaagaagatacgtcttttgggggcaacctcgggcgagcagtcttccaggccaagaagcgggttctcgaacctctcggtctggttgaggaaggcgctaagacggctcctggaaagaagagaccggtagagccgtcaccacagcgttcccccgactcctccacgggcatcggcaagaaaggccagcagcccgccagaaagagactcaatttcggtcagactggcgactcagagtcagtccccgaccctcaacctatcggagaacctccagcagcgccctctagtgtgggatctggtacaatggctgcaggcggtggcgcaccaatggcagacaataacgaaggtgccgacggagtgggtagttcctcgggaaattggcattgcgattccacatggctgggcgacagagtcatcaccaccagcacccgaacctgggccctgcccacctacaacaaccacctctacaagcaaatctccaacgggacctcgggaggcagcaccaacgacaacacctactttggctacagcaccccctgggggtattttgactttaacagattccactgccacttctcaccacgtgactggcagcgactcatcaacaacaactggggattccggcccaagagactcagcttcaagctcttcaacatccaggtcaaagaggtcacgcagaatgaaggcaccaagaccatcgccaataacctcaccagcaccatccaggtgtttacggactcggaataccagctgccgtacgtcctcggctctgcccaccagggctgcctgcctccgttcccggcggacgtcttcatgattcctcagtacggctacctgactctcaacaacggtagtcaggccgtgggacgttcctccttctactgcctggagtacttcccctctcagatgctgagaacgggcaacaacttttccttcagctacactttcgaggacgtgcctttccacagcagctacgcgcacagccagagtttggacaggctgatgaatcctctcatcgaccagtacctgtactacctgtcaagaacccagtctacgggaggcacagcgggaacccagcagttgctgttttctcaggccgggcctagcaacatgtcggctcaggccagaaactggctgcctggaccctgctacagacagcagcgcgtctccacgacactgtcgcaaaacaacaacagcaactttgcctggactggtgccaccaagtatcatctgaacggcagagactctctggtgaatccgggcgtcgccatggcaaccaacaaggacgacgaggaccgcttcttcccatccagcggcatcctcatgtttggcaagcagggagctggaaaagacaacgtggactatagcaacgtgatgctaaccagcgaggaagaaatcaagaccaccaaccccgtggccacagaacagtatggcgtggtggctgataacctacagcagcaaaacaccgctcctattgtgggggccgtcaacagccagggagccttacctggcatggtctggcagaaccgggacgtgtacctgcagggtcctatttgggccaagattcctcacacagatggcaactttcacccgtctcctttaatgggcggctttggacttaaacatccgcctcctcagatcctcatcaaaaacactcctgttcctgcggatcctccaacagcgttcaaccaggccaagctgaattctttcatcacgcagtacagcaccggacaagtcagcgtggagatcgtgtgggagctgcagaaggagaacagcaagcgcaggaacccagagattcagtatacttccaactactacaaatctacaaatgtggactttgctgttaatactgagggtgtttactctgagcctcgccccattggcactcgttacctcacccgtaatctgtaa

SEQ ID NO: 2875 - protein, 738 aa, Artificial Sequence
  Synthetic polypeptide
MAADGYLPDWLEDNLSEGIREWWDLKPGAPKPKANQQKQDDGRGLVLPGYKYLGPFNGLDKGEPVNAADAAALEHDKAYDQQLKAGDNPYLRYNHADAEFQERLQEDTSFGGNLGRAVFQAKKRVLEPLGLVEEGAKTAPGKKRPVEPSPQRSPDSSTGIGKKGQQPARKRLNFGQTGDSESVPDPQPIGEPPAAPSSVGSGTMAAGGGAPMADNNEGADGVGSSSGNWHCDSTWLGDRVITTSTRTWALPTYNNHLYKQISNGTSGGSTNDNTYFGYSTPWGYFDFNRFHCHFSPRDWQRLINNNWGFRPKRLSFKLFNIQVKEVTQNEGTKTIANNLTSTIQVFTDSEYQLPYVLGSAHQGCLPPFPADVFMIPQYGYLTLNNGSQAVGRSSFYCLEYFPSQMLRTGNNFSFSYTFEDVPFHSSYAHSQSLDRLMNPLIDQYLYYLSRTQSTGGTAGTQQLLFSQAGPSNMSAQARNWLPGPCYRQQRVSTTLSQNNNSNFAWTGATKYHLNGRDSLVNPGVAMATNKDDEDRFFPSSGILMFGKQGAGKDNVDYSNVMLTSEEEIKTTNPVATEQYGVVADNLQQQNTAPIVGAVNSQGALPGMVWQNRDVYLQGPIWAKIPHTDGNFHPSPLMGGFGLKHPPPQILIKNTPVPADPPTAFNQAKLNSFITQYSTGQVSVEIVWELQKENSKRRNPEIQYTSNYYKSTNVDFAVNTEGVYSEPRPIGTRYLTRNL

SEQ ID NO: 2876 - protein, 738 aa, Artificial Sequence
  Synthetic polypeptide
MAADGYLPDWLEDNLSEGIREWWDLKPGAPKPKANQQKQDDGRGLVLPGYKYLGPFNGLDKGEPVNAADAAALEHDKAYDQQLKAGDNPYLRYNHADAEFQERLQEDTSFGGNLGRAVFQAKKRVLEPLGLVEEGAKTAPGKKRPVEPSPQRSPDSSTGIGKKGQQPARKRLNFGQTGDSESVPDPQPIGEPPAAPSSVGSGTMAAGGGAPMADNNEGADGVGSSSGNWHCDSTWLGDRVITTSTRTWALPTYNNHLYKQISNGTSGGSTNDNTYFGYSTPWGYFDFNRFHCHFSPRDWQRLINNNWGFRPKRLSFKLFNIQVKEVTQNEGTKTIANNLTSTIQVFTDSEYQLPYVLGSAHQGCLPPFPADVFMIPQYGYLTLNNGSQAVGRSSFYCLEYFPSQMLRTGNNFSFSYTFEDVPFHSSYAHSQSLDRLMNPLIDQYLYYLSRTQSTGGTAGTQQLLFSQAGPSNMSAQARNWLPGPCYRQQRVSTTLSQNNNSNFAWTGATKYHLNGRDSLVNPGVAMATNKDDEDRFFPSSGILMFGKQGAGKDNVDYSNVMLTSEEEIKTTNPVATEQYGVVADNLQQQNTAPIVGAVNSQGALPGMVWQNRDVYLQGPIWAKIPHTDGNFHPSPLMGGFGLKHPPPQILIKNTPVPADPPTAFNQAKLNSFITQYSTGQVSVEIEWELQKENSKRWNPEIQYTSNYYKSTNVDFAVNTEGVYSEPRPIGTRYLTRNL

SEQ ID NO: 2877 - protein, 738 aa, Artificial Sequence
  Synthetic polypeptide
MAADGYLPDWLEDNLSEGIREWWDLKPGAPKPKANQQKQDDGRGLVLPGYKYLGPFNGLDKGEPVNAADAAALEHDKAYDQQLKAGDNPYLRYNHADAEFQERLQEDTSFGGNLGRAVFQAKKRVLEPLGLVEEGAKTAPGKKRPVEPSPQRSPDSSTGIGKKGQQPARKRLNFGQTGDSESVPDPQPIGEPPAAPSSVGSGTMAAGGGAPMADNNEGADGVGSSSGNWHCDSTWLGDRVITTSTRTWALPTYNNHLYKQISNGTSGGSTNDNTYFGYSTPWGYFDFNRFHCHFSPRDWQRLINNNWGFRPKRLSFKLFNIQVKEVTQNEGTKTIANNLTSTIQVFTDSEYQLPYVLGSAHQGCLPPFPADVFMIPQYGYLTLNNGSQAVGRSSFYCLEYFPSQMLRTGNNFSFSYTFEDVPFHSSYAHSQSLDRLMNPLIDQYLYYLSRTQSTGGTAGTQQLLFSQAGPSNMSAQARNWLPGPCYRQQRVSTTLSQNNNSNFAWTGATKYHLNGRDSLVNPGVAMATNKDDEDRFFPSSGILMFGKQGAGKDNVDYSNVMLTSEEEIKTTNPVATEQYGVVADNLQQQNTAPIVGAVNSQGALPGMVWQNRDVYLQGPIWAKIPHTDGNFHPSPLMGGFGLKHPPPQILIKNTPVPADPPTAFNQAKLNSFITQYSTGQVSVEIVWELQKENSKRWNPEIQYTSNYYKSTNVDFAVNTEGVYSEPRPIGTRYLTRNL

SEQ ID NO: 2878 - protein, 738 aa, Artificial Sequence; identical to SEQ ID NO: 2876
  Synthetic polypeptide

SEQ ID NO: 2879 - DNA, 2214 bp, Artificial Sequence
  Synthetic polynucleotide
atggctgctgacggttatcttccagattggctcgaggacaacctctctgagggcattcgcgagtggtgggacctgaaacctggagcccccaagcccaaggccaaccagcagaagcaggacgacggccggggtctggtgcttcctggctacaagtacctcggacccttcaacggactcgacaagggggagcccgtcaacgcggcggacgcagcggccctcgagcacgacaaggcctacgaccagcagctcaaagcgggtgacaatccgtacctgcggtataaccacgccgacgccgagtttcaggagcgtctgcaagaagatacgtcttttgggggcaacctcgggcgagcagtcttccaggccaagaagcgggttctcgaacctctcggtctggttgaggaagctgctaagacggctcctggaaagaagagaccggtagaaccgtcacctcagcgttcccccgactcctccacgggcatcggcaagaaaggccagcagcccgctagaaagagactgaactttgggcagactggcgactcagagtcagtccccgaccctcaaccaatcggagaaccaccagcaggcccctctggtctgggatctggtacaatggctgcaggcggtggcgctccaatggcagacaataacgaaggcgccgacggagtgggtaatgcctcaggaaattggcattgcgattccacatggctgggcgacagagtcatcaccaccagcacccgaacctgggctttgcccacctacaacaaccacctctacaagcaaatctccagtcagtcagcaggtagcaccaacgacaacgtctacttcggctacagcaccccctgggggtattttgacttcaacagattccactgtcacttctcaccacgtgactggcagcggctcatcaacaacaactggggattccggcccaagaagctcaacttcaagctgttcaacatccaggtcaaggaggtcacaacgaatgacggcgtcacgaccatcgccaataaccttaccagcacggttcaggtcttttcggactcggaataccagctgccctacgtcctcggctccgcacaccagggctgcctgcctccgttcccggcggacgtcttcatgattccccagtacggctacctgactctgaacaatggcagccaatcggtgggtcgttcctctttctactgcctggaatatttcccttctcaaatgctgagaacgggcaacaacttcaccttcagctacaccttcgaggacgttcccttccacagcagctacgcacacagccagagcctggaccggctgatgaatcctcttatcgaccagtacctgtattacctggccagaacacagagcaacgcaggaggcacagctggcaatcgggaactgcagttttatcagggcgggcctaccaccatggccgaacaagccaaaaactggctgcctagaccttgcttccggcaacaaagagtctccaagacgctggatcaaaacaacaacagcaactttgcttggactggtgccaccaaataccatctaaatggaagaaattcattggttaatcccggtgtcgccatggcaacccacaaggacgacgaggaacgcttcttcccttcgagcggagtcctgatttttggaaaaactggagcagctaataagactacactggaaaatgtgttaatgacaaatgaagaggaaattcgtcctaccaacccggtagccaccgaggaatacgggactgttagcagcaacctgcaggcggctaacactgcagcccagacacaagttgtcaacaaccagggagccttacctggtatggtctggcagaaccgggacgtgtacctgcagggtcccatctgggccaagattcctcacacggacggcaactttcacccgtctccgctgatgggcggctttggactgaagcatccgcctcctcagatcctgatcaaaaacactcctgttcctgctaatcccccggaggtgtttacgcctgccaagtttgcttctttcatcacacagtacagcaccggccaggtcagcgtggagatcgagtgggagctgcagaaggagaacagcaagcgctggaacccagagattcagtatacctccaattttgacaaacagactggtgtggactttgccgttgacagccagggtgtttattctgagcctcgccccattggtactcgttacctcacccgtaatctgtaa

SEQ ID NO: 2880 - protein, 737 aa, Artificial Sequence
  Synthetic polypeptide
MAADGYLPDWLEDNLSEGIREWWDLKPGAPKPKANQQKQDDGRGLVLPGYKYLGPFNGLDKGEPVNAADAAALEHDKAYDQQLKAGDNPYLRYNHADAEFQERLQEDTSFGGNLGRAVFQAKKRVLEPLGLVEEAAKTAPGKKRPVEPSPQRSPDSSTGIGKKGQQPARKRLNFGQTGDSESVPDPQPIGEPPAGPSGLGSGTMAAGGGAPMADNNEGADGVGNASGNWHCDSTWLGDRVITTSTRTWALPTYNNHLYKQISSQSAGSTNDNVYFGYSTPWGYFDFNRFHCHFSPRDWQRLINNNWGFRPKKLNFKLFNIQVKEVTTNDGVTTIANNLTSTVQVFSDSEYQLPYVLGSAHQGCLPPFPADVFMIPQYGYLTLNNGSQSVGRSSFYCLEYFPSQMLRTGNNFTFSYTFEDVPFHSSYAHSQSLDRLMNPLIDQYLYYLARTQSNAGGTAGNRELQFYQGGPTTMAEQAKNWLPRPCFRQQRVSKTLDQNNNSNFAWTGATKYHLNGRNSLVNPGVAMATHKDDEERFFPSSGVLIFGKTGAANKTTLENVLMTNEEEIRPTNPVATEEYGTVSSNLQAANTAAQTQVVNNQGALPGMVWQNRDVYLQGPIWAKIPHTDGNFHPSPLMGGFGLKHPPPQILIKNTPVPANPPEVFTPAKFASFITQYSTGQVSVEIEWELQKENSKRWNPEIQYTSNFDKQTGVDFAVDSQGVYSEPRPIGTRYLTRNL

SEQ ID NO: 2881 - DNA, 2214 bp, Artificial Sequence
  Synthetic polynucleotide
atggctgctgacggttatcttccagattggctcgaggacaacctctctgagggcattcgcgagtggtgggacctgaaacctggagcccccaagcccaaggccaaccagcagaagcaggacgacggccggggtctggtgcttcctggctacaagtacctcggacccttcaacggactcgacaagggggagcccgtcaacgcggcggacgcagcggccctcgagcacgacaaggcctacgaccagcagctcaaagcgggtgacaatccgtacctgcggtataaccatgccgacgccgagtttcaggagcgtctgcaagaagatacgtcttttgggggcaacctcgggcgagcagtcctccaggccaagaagcgggttctcgaacctctcggtctggttgaggaagctgctaagacggctcctggaaagaagagaccggtagaaccgtcacctcagcgttcccccgactcctccacgggcatcggcaagaaaggccagcagcccgctagaaagagactgaactttgggcagactggcgactcagagtcagtccccgaccctcaaccaatcggagaaccaccagcaggcccctctggtctgggatctggtacaatggctgcaggcggtggcgctccaatggcagacaataacgaaggcgccgacggagtgggtaatgcctcaggaaattggcattgcgattccacatggctgggcgacagagtcatcaccaccagcacccgaacctgggctttgcccacctacaacaaccacctctacaagcaaatctccagtcagtcagcaggtagcaccaacgacaacgtctacttcggctacagcaccccctgggggtattttgacttcaacagattccactgtcacttctcaccacgtgactggcagcggctcatcaacaacaactggggattccggcccaagaagctcaacttcaagctgttcaacatccaggtcaaggaggtcacaacgaatgacggcgtcacgaccatcgccaataaccttaccagcacggttcaggtcttttcggactcggaataccagctgccctacgtcctcggctccgcacaccagggctgcctgcctccgttcccggcggacgtcttcatgattccccagtacggctacctgactctgaacaatggcagccaatcggtgggtcgttcctctttctactgcctggaatatttcccttctcaaatgctgagaacgggcaacaacttcaccttcagctacaccttcgaggacgttcccttccacagcagctacgcacacagccagagcctggaccggctgatgaatcctcttatcgaccagtacctgtattacctggccagaacacagagcaacgcaggaggcacagctggcaatcgggaactgcagttttatcagggcgggcctaccaccatggccgaacaagccaaaaactggctgcctggaccttgcttccggcaacaaagagtctccaagacgctggatcaaaacaacaacagcaactttgcttggactggtgccaccaaataccatctaaatggaagaaattcattggttaatcccggtgtcgccatggcaacccacaaggacgacgaggaacgcttcttcccttcgagcggagtcctgatttttggaaaaactggagcagctaataagactacactggaaaatgtgttaatgacaaatgaagaggaaattcgtcctaccaacccggtagccaccgaggaatacgggactgttagcagcaacctgcaggcggctaacactgcagcccagacacaagttgtcaacaaccagggagccttacctggtatggtctggcagaaccgggacgtgtacctgcagggtcccatctgggccaagattcctcacacggacggcaactttcacccgtctccgctgatgggcggctttggactgaagcatccgcctcctcagatcctgatcaaaaacactcctgttcctgctaatcccccggaggtgtttacgcctgccaagtttgcttctttcatcacacagtacagcaccggccaggtcagcgtggagatcgagtgggagctgcagaaggagaacagcaagcgctggaacccagagattcagtatacctccaattttgacaaacagactggtgtggactttgccgttgacagccagggtgtttattctgagcctcgccccattggtactcgttacctcacccgtaatctgtaa

SEQ ID NO: 2882 - protein, 737 aa, Artificial Sequence; identical to SEQ ID NO: 2841
  Synthetic polypeptide

SEQ ID NO: 2883 - protein, 737 aa, Artificial Sequence
  Synthetic polypeptide
MAADGYLPDWLEDNLSEGIREWWDLKPGAPKPKANQQKQDDGRGLVLPGYKYLGPFNGLDKGEPVNAADAAALEHDKAYDQQLKAGDNPYLRYNHADAEFQERLQEDTSFGGNLGRAVLQAKKRVLEPLGLVEEAAKTAPGKKRPVEPSPQRSPDSSTGIGKKGQQPARKRLNFGQTGDSESVPDPQPIGEPPAGPSGLGSGTMAAGGGAPMADNNEGADGVGNASGNWHCDSTWLGDRVITTSTRTWALPTYNNHLYKQISSQSAGSTNDNVYFGYSTPWGYFDFNRFHCHFSPRDWQRLINNNWGFRPKKLNFKLFNIQVKEVTTNDGVTTIANNLTSTVQVFSDSEYQLPYVLGSAHQGCLPPFPADVFMIPQYGYLTLNNGSQSVGRSSFYCLEYFPSQMLRTGNNFTFSYTFEDVPFHSSYAHSQSLDRLMNPLIDQYLYYLARTQSNAGGTAGNRELQFYQGGPTTMAEQAKNWLPGPCFRQQRVSKTLDQNNNSNFAWTGATKYHLNGRNSLVNPGVAMATHKDDEERFFPSSGVLIFGKTGAANKTTLENVLMTNEEEIRPTNPVATEEYGTVSSNLQAANTAAQTQVVNNQGALPGMVWQNRDVYLQGPIWAKIPHTDGNFHPSPLMGGFGLKHPPPQILIKNTPVPANPPEVFTPAKFASFITQYSTGQVSVEIEWELQKENSKRWNPEIQYTSNFDKQTGVDFAVDSQGVYSEPRPIGTRYLTRNL

SEQ ID NO: 2884 - DNA, 2217 bp, Artificial Sequence
  Synthetic polynucleotide
atggctgccgatggttatcttccagattggctcgaggacaacctctctgagggcattcgcgagtggtgggacctgaaacctggagccccgaaacccaaagccaaccagcaaaagcaggacgacggccggggtctggtgcttcctggctacaagtacctcggacccttcaacggactcgacaagggggagcccgtcaacgcggcggacgcagcggccctcgagcacgacaaggcctacgaccagcagctcaaagcgggtgacaatccgtacctgcggtataatcacgccgacgccgagtttcaggagcgtctgcaagaagatacgtcttttgggggcaacctcgggcgagcagtcttccaggccaagaagcgggttctcgaacctctcggtctggttgaggaaggcgctaagacggctcctggaaagaagagaccggtagagccgtcaccacagcgttcccccgactcctccacgggcatcggcaagaaaggccagcagcccgccagaaagagactcaatttcggtcagactggcgactcagagtcagtccccgaccctcaacctatcggagaacctccagcagcgccctctagtgtgggatctggtacaatggctgcaggcggtggcgcaccaatggcagacaataacgaaggtgccgacggagtgggtagttcctcgggaaattggcattgcgattccacatggctgggcgacagagtcatcaccaccagcacccgaacctgggccctgcccacctacaacaaccacctctacaagcaaatctccaacgggacctcgggaggcagcaccaacgacaacacctactttggctacagcaccccctgggggtattttgactttaacagattccactgccacttctcaccacgtgactggcagcgactcatcaacaacaactggggattccggcccaagagactcagcttcaagctcttcaacatccaggtcaaagaggtcacgcagaatgaaggcaccaagaccatcgccaataacctcaccagcaccatccaggtgtttacggactcggaataccagctgccgtacgtcctcggctctgcccaccagggctgcctgcctccgttcccggcggacgtcttcatgattcctcagtacggctacctgactctcaacaacggtagtcaggccgtgggacgttcctccttctactgcctggagtacttcccctctcagatgctgagaacgggcaacaacttttccttcagctacactttcgaggacgtgcctttccacagcagctacgcgcacagccagagtttggacaggctgatgaatcctctcatcgaccagtacctgtactacctgtcaagaacccagtctacgggaggcacagcgggaacccagcagttgctgttttctcaggccgggcctagcaacatgtcggctcaggccagaaactggctgcctggaccctgctacagacagcagcgcgtctccacgacactgtcgcaaaacaacaacagcaactttgcctggactggtgccaccaagtatcatctgaacggcagagactctctggtgaatccgggcgtcgccatggcaaccaacaaggacgacgaggaccgcttcttcccacccagcggcatcctcatgtttggcaagcagggagctggaaaagacaacgtggactatagcaacgtgatgctaaccagcgaggaagaaatcaagaccaccaaccccgtggccacagaacagtatggcgtggtggctgataacctacagcagcaaaacaccgctcctattgtgggggccgtcaacagccagggagccttacctggcatggtctggcagaaccgggacgtgtacctgcagggtcctatttgggccaagattcctcacacagatggcaactttcacccgtctcctttaatgggcggctttggacttaaacatccgcctcctcagatcctcatcaaaaacactcctgttcctgcggatcctccaacagcgttcaaccaggccaagctgaattctttcatcacgcagtacagcaccggacaagtcagcgtggtgatcgagtgggagctgcagaaggagaacagcaagcgctggaacccagagattcagtatacttccaactactacaaatctacaaatgtggactttgctgttaatactgagggtgtttactctgagcttcgccccattggcactcgttacctcacccgtaatctgtaa

SEQ ID NO: 2885 - protein, 738 aa, Artificial Sequence
  Synthetic polypeptide
MAADGYLPDWLEDNLSEGIREWWDLKPGAPKPKANQQKQDDGRGLVLPGYKYLGPFNGLDKGEPVNAADAAALEHDKAYDQQLKAGDNPYLRYNHADAEFQERLQEDTSFGGNLGRAVFQAKKRVLEPLGLVEEGAKTAPGKKRPVEPSPQRSPDSSTGIGKKGQQPARKRLNFGQTGDSESVPDPQPIGEPPAAPSSVGSGTMAAGGGAPMADNNEGADGVGSSSGNWHCDSTWLGDRVITTSTRTWALPTYNNHLYKQISNGTSGGSTNDNTYFGYSTPWGYFDFNRFHCHFSPRDWQRLINNNWGFRPKRLSFKLFNIQVKEVTQNEGTKTIANNLTSTIQVFTDSEYQLPYVLGSAHQGCLPPFPADVFMIPQYGYLTLNNGSQAVGRSSFYCLEYFPSQMLRTGNNFSFSYTFEDVPFHSSYAHSQSLDRLMNPLIDQYLYYLSRTQSTGGTAGTQQLLFSQAGPSNMSAQARNWLPGPCYRQQRVSTTLSQNNNSNFAWTGATKYHLNGRDSLVNPGVAMATNKDDEDRFFPPSGILMFGKQGAGKDNVDYSNVMLTSEEEIKTTNPVATEQYGVVADNLQQQNTAPIVGAVNSQGALPGMVWQNRDVYLQGPIWAKIPHTDGNFHPSPLMGGFGLKHPPPQILIKNTPVPADPPTAFNQAKLNSFITQYSTGQVSVVIEWELQKENSKRWNPEIQYTSNYYKSTNVDFAVNTEGVYSELRPIGTRYLTRNL

SEQ ID NO: 2886 - DNA, 2214 bp, Artificial Sequence
  Synthetic polynucleotide
atggctgctgacggttatcttccagattggctcgaggacaacctctctgagggcattcgcgagtggtgggacctgaaacctggagcccccaagcccaaggccaaccagcagaagcaggacgacggccggggtctggtgcttcctggctacaagtacctcggacccttcaacggactcgacaagggggagcccgtcaacgcggcggacgcagcggccctcgagcacgacaaggcctacgaccagcagctcaaagcgggtgacaatccgtacctgcggtataaccacgccgacgccgagtttcaggagcgtctgcaagaagatacgtcttttgggggcaacctcgggcgagcagtcttccaggccaagaagcgggttctcgaacctctcggtctggttgaggaagctgctaagacggctcctggaaagaagagaccggtagaaccgtcacctcagcgttcccccgactcctccacgggcatcggcaagaaaggccagcagcccgctagaaagagactgaactttgggcagactggcgactcagagtcagtccccgaccctcaaccaatcggagaaccaccagcaggcccctctggtctgggatctggtacaatggctgcaggcggtggcgccccaatggcagacaataacgaaggcgccgacggagtgggtaatgcctcaggaaattggcattgcgattccacatggctgggcgacagagtcatcaccaccagcacccgaacctgggctttgcccacctacaacaaccacctctacaagcaaatctccagtcagtcagcaggtagcaccaacgacaacgtctacttcggctacagcaccccctgggggtattttgacttcaacagattccactgtcacttctcaccacgtgactggcagcggctcatcaacaacaactggggattccggcccaagaagctcaacttcaagctgttcaacatccaggtcaaggaggtcacaacgaatgacggcgtcacgaccatcgccaataaccttaccagcacggttcaggtcttttcggactcggaataccagctgccctacgtcctcggctccgcacaccagggctgcctgcctccgttcccggcggacgtcttcatgattccccagtacggctacctgactctgaacaatggcagccaatcggtgggtcgttcctctttctactgcctggaatatttcccttctcaaatgctgagaacgggcaacaacttcaccatcagctacaccttcgaggacgttcccttccacagcagctacgcacacagccagagcctggaccggctgatgaatcctcttatcgaccagtacctgtattacctggccagaacacagagcaacgcaggaggcacagctggcaatcaggaactgcagttttatcagggcgggcctaccaccatggccgaacaagccaaaaactggctgcctggaccttgcttccggcaacaaagagtctccaagacgctggatcaaaacaacaacagcaactttgcttggactggtgccaccaaataccatctaaatggaagaaattcattggttaatcccggtgtcgccatggcaacccacaaggacgacgaggaacgcttcttcccttcgagcggagtcctgatttttggaaaaactggagcagctaataagactacactggaaaatgtgttaatgacaaatgaagaggaaattcgtcctaccaacccggtagccaccgaggaatacgggactgttagcagcaacctgcaggcggctaacactgcagcccagacacaagttgtcaacaaccagggagccttacctggtatggtctggcagaaccgggacgtgtacctgcagggtcccatctgggccaagattcctcacacagatggcaactttcacccgtctcctttaatgggcggctttggacttaaacatccgcctcctcagatcctcatcaaaaacactcctgttcctgcggatcctccaacagcgttcaaccaggccaagctgaattctttcatcacgcagtacagcaccggacaagtcagcgtggagatcgagtgggagctgcagaaggagaacagcaagcgctggaacccagagattcagtatacttccaactactacaaatctacaaatgtggactttgctgttaatactgagggtgtttactctgagcctcgccccattggcactcgttacctcacccgtaatctgtaa

SEQ ID NO: 2887 - protein, 737 aa, Artificial Sequence
  Synthetic polypeptide
MAADGYLPDWLEDNLSEGIREWWDLKPGAPKPKANQQKQDDGRGLVLPGYKYLGPFNGLDKGEPVNAADAAALEHDKAYDQQLKAGDNPYLRYNHADAEFQERLQEDTSFGGNLGRAVFQAKKRVLEPLGLVEEAAKTAPGKKRPVEPSPQRSPDSSTGIGKKGQQPARKRLNFGQTGDSESVPDPQPIGEPPAGPSGLGSGTMAAGGGAPMADNNEGADGVGNASGNWHCDSTWLGDRVITTSTRTWALPTYNNHLYKQISSQSAGSTNDNVYFGYSTPWGYFDFNRFHCHFSPRDWQRLINNNWGFRPKKLNFKLFNIQVKEVTTNDGVTTIANNLTSTVQVFSDSEYQLPYVLGSAHQGCLPPFPADVFMIPQYGYLTLNNGSQSVGRSSFYCLEYFPSQMLRTGNNFTISYTFEDVPFHSSYAHSQSLDRLMNPLIDQYLYYLARTQSNAGGTAGNQELQFYQGGPTTMAEQAKNWLPGPCFRQQRVSKTLDQNNNSNFAWTGATKYHLNGRNSLVNPGVAMATHKDDEERFFPSSGVLIFGKTGAANKTTLENVLMTNEEEIRPTNPVATEEYGTVSSNLQAANTAAQTQVVNNQGALPGMVWQNRDVYLQGPIWAKIPHTDGNFHPSPLMGGFGLKHPPPQILIKNTPVPADPPTAFNQAKLNSFITQYSTGQVSVEIEWELQKENSKRWNPEIQYTSNYYKSTNVDFAVNTEGVYSEPRPIGTRYLTRNL

SEQ ID NO: 2888 - DNA, 2217 bp, Artificial Sequence
  Synthetic polynucleotide
atggctgccgatggttatcttccagattggctcgaggacaacctctctgagggcattcgcgagtggtgggacctgaaacctggagccccgaaacccaaagccaaccagcaaaagcaggacgacggccggggtctggtgcttcctggctacaagtacctcggacccttcaacggactcgacaagggggagcccgtcaacgcggcggacgcagcggccctcgagcacgacaaggcctacgaccagcagctcaaagcgggtgacaatccgtacctgcggtataatcacgccgacgccgagtttcaggagcgtctgcaagaagatacgtcttttgggggcaacctcgggcgagcagtcttccaggccaagaagcgggttctcgaacctctcggtctggttgaggaaggcgctaagacggctcctggaaagaagagaccggtagagccgtcaccacagcgttcccccgactcctccacgggcatcggcaagaaaggccagcagcccgccagaaagagactcaatttcggtcagactggcgactcagagtcagtccccgaccctcaacctatcggagaacctccagcagcgccctctagtgtgggatctggtacaatggctgcaggcggtggcgcaccaatggcagacaataacgaaggtgccgacggagtgggtagttcctcgggaaattggcattgcgattccacatggctgggcgacagagtcatcaccaccagcacccgaacctgggccctgcccgcctacaacaaccacctctacaagcaaatctccaacgggacctcgggaggcagcaccaacgacaacacctactttggctacagcaccccctgggggtattttgactttaacagattccactgccacttctcaccacgtgactggcagcgactcatcaacaacaactggggattccggcccaagagactcagcttcaagctcttcaacatccaggtcaaagaggtcacgcagaatgaaggcaccaagaccatcgccaataacctcaccagcaccatccaggtgtttacggactcggaataccagctgccgtacgtcctcggctctgcccaccagggctgcctgcctccgttcccggcggatgtcttcatgattcctcagtacggctacctgactctcaacaacggtagtcaggccgtgggacgttcctccttctactgcctggagtacttcccctctcagatgctgagaacgggcaacaacttttccttcagctacactttcgaggacgtgcctttccacagcagctacgcgcacagccagagtttggacaggctgatgaatcctctcatcgaccagtacctgtactacctgtcaagaacccagtctacgggaggcacagcgggaacccagcagttgctgttttctcaggccgggcctagcaacatgtcggctcaggccagaaactggctgcctggaccctgctacagacagcagcgcgtctccacgacactgtcgcaaaacaacaacagcaactttgcctggactggtgccaccaagtatcatctgagcggcagagactctctggtgaatccgggcgtcgccatggcaaccaacaaggacgacgaggaccgcttcttcccatccagcggcatcctcatgtttggcaagcagggagctggaaaagacaacgtggactatagcaacgtgatgctaaccagcgaggaagaaatcaagaccaccaaccccgtggccacagaacagtatggcgtggtggctgataacctacagcagcaaaacaccgctcctattgtgggggccgtcaacagccagggagccttacctggcatggtctggcagaaccgggacgtgtacctgcagggtcctatttgggccaagattcctcacacagatggcaactttcacccgtctcctttaatgggcggctttggacttaaacatccgcctcctcagatcctcatcaaaaacactcctgttcctgcggatcctccaacagcgttcaaccaggccaagctgaattcttccatcacgcagtacagcaccggacaagtcagcgtggagatcgagtgggagctgcagaaggagaacagcaagcgctggaacccagagattcagtatacttccaactactacaaatctacaaatgtggactttgctgttaatactgagggtgtttactctgagcctcgccccattggcactcgttacctcacccgtaatttgtaa

SEQ ID NO: 2889 - protein, 738 aa, Artificial Sequence
  Synthetic polypeptide
MAADGYLPDWLEDNLSEGIREWWDLKPGAPKPKANQQKQDDGRGLVLPGYKYLGPFNGLDKGEPVNAADAAALEHDKAYDQQLKAGDNPYLRYNHADAEFQERLQEDTSFGGNLGRAVFQAKKRVLEPLGLVEEGAKTAPGKKRPVEPSPQRSPDSSTGIGKKGQQPARKRLNFGQTGDSESVPDPQPIGEPPAAPSSVGSGTMAAGGGAPMADNNEGADGVGSSSGNWHCDSTWLGDRVITTSTRTWALPAYNNHLYKQISNGTSGGSTNDNTYFGYSTPWGYFDFNRFHCHFSPRDWQRLINNNWGFRPKRLSFKLFNIQVKEVTQNEGTKTIANNLTSTIQVFTDSEYQLPYVLGSAHQGCLPPFPADVFMIPQYGYLTLNNGSQAVGRSSFYCLEYFPSQMLRTGNNFSFSYTFEDVPFHSSYAHSQSLDRLMNPLIDQYLYYLSRTQSTGGTAGTQQLLFSQAGPSNMSAQARNWLPGPCYRQQRVSTTLSQNNNSNFAWTGATKYHLSGRDSLVNPGVAMATNKDDEDRFFPSSGILMFGKQGAGKDNVDYSNVMLTSEEEIKTTNPVATEQYGVVADNLQQQNTAPIVGAVNSQGALPGMVWQNRDVYLQGPIWAKIPHTDGNFHPSPLMGGFGLKHPPPQILIKNTPVPADPPTAFNQAKLNSSITQYSTGQVSVEIEWELQKENSKRWNPEIQYTSNYYKSTNVDFAVNTEGVYSEPRPIGTRYLTRNL

SEQ ID NO: 2890 - protein, 736 aa, Artificial Sequence; identical to SEQ ID NO: 2390
  Synthetic polypeptide

SEQ ID NO: 2891 - DNA, 2217 bp, Artificial Sequence
  Synthetic polynucleotide
atggctgctgacggttatcttccagattggctcgaggacaacctctctgagggcattcgcgagtggtgggacctgaaacctggagcccccaagcccaaggccaaccagcagaagcaggacgacggccggggtctggtgcttcctggctacaagtacctcggacccttcaacggactcgacaagggggagcccgtcaacgcggcggacgcagcggccctcgagcacgacaaggcctacgaccagcagctcaaagcgggtgacaatccgtacctgcggtataaccacgccgacgccgagtttcaggagcgtctgcaagaagatacgtcttttgggggcaacctcgggcgagcagtcttccaggccaagaagcgggttctcgaacctctcggtctggttgaggaagctgctaagacggctcctggaaagaagagaccggtagaaccgtcacctcagcgttcccccgactcctccacgggcatcggcaagaaaggccagcagcccgctaaaaagagactgaactttggtcagactggcgactcagagtcagtccccgaccctcaaccaatcggagaaccaccagcaggcccctctggtctgggatctggtacaatggctgcaggcggtggcgctccaatggcagacaataacgaaggcgccgacggagtgggtagttcctcaggaaattggcattgcgattccacatggctgggcgacagagtcatcaccaccagcacccgaacctgggccctgcccacctacaacaaccacctctacaagcaaatatccaatgggacatcgggaggaagcaccaacgacaacacctacttcggctacagcaccccctgggggtattttgacttcaacagattccactgccacttctcaccacgtgactggcagcgactcatcaacaacaactggggattccggccaaaaagactcagcttcaagctcttcaacatccaggtcaaggaggtcacgcagaatgaaggcaccaagaccatcgccaataaccttaccagcacgattcaggtatttacggactcggaataccagctgccgtacgtcctcggctccgcgcaccagggctgcctgcctccgttcccggcggacgtcttcatgattccccagtacggctaccttacactgaacaatggaagtcaagccgtaggccgttcctccttctactgcctggaatattttccatctcaaatgctgcgaactggaaacaattttgaattcagctacaccttcgaggacgtgcctttccacagcagctacgcacacagccagagcttggaccgactgatgaatcctctcatcgaccagtacctgtactacttatccagaactcagtccacaggaggaactcaaggtacccagcaattgttattttctcaagctgggcctgcaaacatgtcggctcaggctaagaactggctacctggaccttgctaccggcagcagcgagtctctacgacactgtcgcaaaacaacaacagcaactttgcttggactggtgccaccaaatatcacctgaacggaagagactctttggtaaatcccggtgtcgccatggcaacccacaaggacgacgaggaacgcttcttcccgtcgagtggagtcctgatgtttggaaaacagggtgctggaagagacaatgtggactacagcagcgttatgctaaccagcgaagaagaaattaaaaccactaaccctgtagccacagaacaatacggtgtggtggctgacaacttgcagcaaaccaatacagggcctattgtgggaaatgtcaacagccaaggagccttacctggcatggtctggcagaaccgagacgtgtacctgcagggtcccatctgggccaagattcctcacacggacggcaacttccacccttcaccgctaatgggaggatttggactgaagcacccacctcctcagatcctgatcaagaacacgccggtacctgcggatcctccaacaacgttcagccaggcgaaattggcttccttcattacgcagtacagcaccggacaggtcagcgtggaaatcgagtgggagctgcagaaggagaacagcaaacgctggaacccagagattcagtacacttcaaactactacaaatctacaaatgtggactttgctgtcaatacagagggaacttattctgagcctcgccccattggtactcgttacctcacccgtaatctgtaa

SEQ ID NO: 2892 - protein, 738 aa, Artificial Sequence
  Synthetic polypeptide
MAADGYLPDWLEDNLSEGIREWWDLKPGAPKPKANQQKQDDGRGLVLPGYKYLGPFNGLDKGEPVNAADAAALEHDKAYDQQLKAGDNPYLRYNHADAEFQERLQEDTSFGGNLGRAVFQAKKRVLEPLGLVEEGAKTAPGKKRPVEPSPQRSPDSSTGIGKKGQQPARKRLNFGQTGDSESVPDPQPLGEPPAAPSSVGSGTMAAGGGAPMADNNEGADGVGSSSGNWHCDSTWLGDRVITTSTRTWALPTYNNHLYKQISNGTSGGSTNDNTYFGYSTPWGYFDFNRFHCHFSPRDWQRLINNNWGFRPKRLSFKLFNIQVKEVTQNEGTKTIANNLTSTIQVFTDSEYQLPYVLGSAHQGCLPPFPADVFMIPQYGYLTLNNGSQAVGRSSFYCLEYFPSQMLRTGNNFSFSYTFEDVPFHSSYAHSQSLDRLMNPLIDQYLYYLSRTQSTGGTAGTQQLLFSQAGPSNMSAQARNWLPGPCYRQQRVSTTLSQNNNSNFAWTGATKYHLNGRDSLVNPGVAMATNKDDEDRFFPSSGILMFGKQGAGKDNVDYSNVMLTSEEEIKTTNPVATEQYGVVADNLQRQNTAPIVGAVNSQGALPGMVWQNRDVYLQGPIWAKIPHTDGNFHPSPLMGGFGLKHPPPQILIKNTPVPADPPTAFNQAKLNSFITQYSTGQVSVEIEWELQKENSKRWNPEIQYTSNYYKSTNVDFAVNTEGVYSEPRPIGTRYLTRNL

SEQ ID NO: 2893 - protein, 736 aa, Artificial Sequence
  Synthetic polypeptide
MAADGYLPDWLEDNLSEGIREWLNLKPGAPQPKANQQKQDNARGLVLPGYKYLGPFNGLDKGDPVNEADAAALEHDKAYGQQLKAGDNPYLKYNHADAEFQERLQKDTSFGGNLGKAVFQAKKRILEPLGLVETPAKTAPGKKRPVDPSPQRSPDSSSGIGKKSPHPARKRLNFGQTGEAESVPDPQPIGEPPSDPSSVGSGTMAAGGGAPMADNNEGADGVGNSSGNWHCDSTWLGDRVITTSTRTWALPTYNNHLYKQISSQSGATNDNHYFGYSTPWGYFDFNRFHCHFSPRDWQRLINNNWGFRPKRLSFKLFNIQVKEVTQNDGTTTIANNLTSTVQVFTDSEYQLPYVLGSAHQGCLPPFPADVFMIPQYGYLTLNNGSQAVGRSSFYCLEYFPSQMLRTGNNFQFSYTFEDVPFHSSYAHSQSLDRLMNPLIDQYLYYLSKTQGTNATVQGAKLQFSQAGPSNMRDQARNWLPGPCYRQQRVSKTANDNNNSEYAWTGATKYHLNGRDSLVNPGPAMASHKDDEEKFFPMNGTLVFGKNGAGNSNVDIENVMITDEEEIRTTNPVATEQYGVVSDNLQSSNTRPITGDVDSQGVLPGMVWQDRDVYLQGPIWAKIPHTDGHFHPSPLMGGFGLKHPPPQILIKNTPVPANPATTFTPGKFASFITQYSTGQVSVQIEWELQKENSKRWNPEIQYTSNYNKSVNVDFTVDTNGVYSEPRPIGTRYLTRNL

SEQ ID NO: 2894 - protein, 736 aa, Artificial Sequence; identical to SEQ ID NO: 2469
  Synthetic polypeptide

SEQ ID NO: 2895 - protein, 736 aa, Artificial Sequence
  Synthetic polypeptide
MAADGYLPDWLEDNLSEGIREWWDLKPGAPKPKANQQKQDDGRGLVLPGYKYLGPFNGLDKGEPVNAADAAALEHDKAYDQQLKAGDNPYLRYNHADAEFQERLQEDTSFGGNLGRAVFQAKKRVLEPLGLVEEGAKTAPGKKRPVEQSPQEPDSSSGIGKTGQQPAKKRLNFGQTGDSESVPDPQPLGEPPAAPSGLGPNTMASGGGAPMADNNEGADGVGNSSGNWHCDSTWLGDRVITTSTRTWALPTYNNHLYKQISNGTSGGSTNDNTYFGYSTPWGYFDFNRFHCHFSPRDWQRLINNNWGFRPKRLNFKLFNIQVKEVTTNEGTKTIANNLTSTVQVFTDSEYQLPYVLGSAHQGCLPPFPADVFMVPQYGYLTLNNGSQALGRSSFYCLEYFPSQMLRTGNNFQFSYTFEDVPFHSSYAHSQSLDRLMNPLIDQYLYYLVRTQTTGTGGTQTLAFSQAGPSSMANQARNWVPGPCYRQQRVSTTTNQNNNSNFAWTGAAKFKLNGRDSLMNPGVAMASHKDDEDRFFPSSGVLIFGKQGAGNDGVDYSQVLITDEEEIKATNPVATEEYGAVAINNQAANTQAQTGLVHNQGVIPGMVWQNRDVYLQGPIWAKIPHTDGNFHPSPLMGGFGLKHPPPQILIKNTPVPADPPLTFNQAKLNSFITQYSTGQVSVEIEWELQKENSKRWNPEIQYTSNYYKSTNVDFAVNTEGVYSEPRPIGTRYLTRNL

SEQ ID NO: 2896 - protein, 736 aa, Artificial Sequence; identical to SEQ ID NO: 2895
  Synthetic polypeptide

SEQ ID NO: 2897 - protein, 736 aa, Artificial Sequence
  Synthetic polypeptide
MAADGYLPDWLEDNLSEGIREWWDLKPGAPKPKANQQKQDDGRGLVLPGYKYLGPFNGLDKGEPVNAADAAALEHDKAYDQQLKAGDNPYLRYNHADAEFQERLQEDTSFGGNLGRAVFQAKKRVLEPLGLVEEGAKTAPGKKRPVEQSPQEPDSSSGIGKTGQQPAKKRLNFGQTGDSESVPDPQPLGEPPAAPSGLGPNTMASGGGAPMADNNEGADGVGNSSGNWHCDSTWLGDRVITTSTRTWALPTYNNHLYKQISNGTSGGSTNDNTYFGYSTPWGYFDFNRFHCHFSPRDWQRLINNNWGFRPKRLNFKLFNIQVKEVTTNEGTKTIANNLTSTVQVFTDSEYQLPYVLGSAHQGCLPPFPADVFMVPQYGYLTLNNGSQALGRSSFYCLEYFPSQMLRTGNNFQFSYTFEDVPFHSSYAHSQSLDRLMNPLIDQYLYYLVRTQTTGTGGTQTLAFSQAGPSSMANQARNWVPGPCYRQQRVSTTTNQNNNSNFAWTGAAKFKLNGRDSLMNPGVAMASHKDDEDRFFPSSGVLIFGKQGAGNDGVDYSQVLITDEEEIKATNPVATEEYGAVAINNQRANTQAQTGLVHNQGVIPGMVWQNRDVYLQGPIWAKIPHTDGNFHPSPLMGGFGLKHPPPQILIKNTPVPADPPLTFNQAKLNSFITQYSTGQVSVEIEWELQKENSKRWNPEIQYTSNYYKSTNVDFAVNTEGVYSEPRPIGTRYLTRNL

SEQ ID NO: 2898 - protein, 736 aa, Artificial Sequence
  Synthetic polypeptide
MAADGYLPDWLEDNLSEGIREWWDLKPGAPKPKANQQKQDDGRGLVLPGYKYLGPFNGLDKGEPVNAADAAALEHDKAYDQQLKAGDNPYLRYNHADAEFQERLQEDTSFGGNLGRAVFQAKKRVLEPLGLVEEGAKTAPGKKRPVEQSPQEPDSSSGIGKTGQQPAKKRLNFGQTGDSESVPDPQPLGEPPAAPSGLGPNTMASGGGAPMADNNEGADGVGNSSGNWHCDSTWLGDRVITTSTRTWALPTYNNHLYKQISNGTSGGSTNDNTYFGYSTPWGYFDFNRFHCHFSPRDWQRLINNNWGFRPKRLNFKLFNIQVKEVTTNEGTKTIANNLTSTVQVFTDSEYQLPYVLGSAHQGCLPPFPADVFMVPQYGYLTLNNGSQALGRSSFYCLEYFPSQMLRTGNNFQFSYTFEDVPFHSSYAHSQSLDRLMNPLIDQYLYYLVRTQTTGTGGTQTLAFSQAGPSSMANQARNWVPGPCYRQQRVSTTTNQNNNSNFAWTGAAKFKLNGRDSLMNPGVAMASHKDDEDAFFPSSGVLIFGKQGAGNDGVDYSQVLITDEEEIKATNPVATEEYGAVAINNQAANTQAQTGLVHNQGVIPGMVWQNRDVYLQGPIWAKIPHTDGNFHPSPLMGGFGLKHPPPQILIKNTPVPADPPLTFNQAKLNSFITQYSTGQVSVEIEWELQKENSKRWNPEIQYTSNYYKSTNVDFAVNTEGVYSEPRPIGTRYLTRNL

SEQ ID NO: 2899 - DNA, 1803 bp, Bovine adeno-associated virus
acggcgcctgcggcaaaaaagaggcctctagagcagagtcctcaagagccagactcctcgagcggagttggcaagaaaggcaaacagcctgccagaaagagactcaactttgacgacgaacctggagccggagacgggcctcccccagaaggaccatcttccggagctatgtctactgagactgaaatgcgtgcagcagctggcggaaatggtggcgatgcgggacaaggtgccgagggagtgggtaatgcctccggtgattggcattgcgattccacttggtcagagagccacgtcaccaccacctcaacccgcacctgggtcctgccgacctacaacaaccacctgtacctgcggctcggctcgagcaacgccagcgacaccttcaacggattctccaccccctggggatactttgactttaaccgcttccactgccacttctcgccaagagactggcaaaggctcatcaacaaccactggggactgcgccccaaaagcatgcaagtccgcatcttcaacatccaagttaaggaggtcacgacgtctaacggggagacgaccgtatccaacaacctcaccagcacggtccagatctttgcggacagcacgtacgagctcccgtacgtgatggatgcaggtcaggagggcagcttgcctcctttccccaacgacgtgttcatggtgcctcagtacgggtactgcggactggtaaccggaggcagctctcaaaaccagacagacagaaatgccttctactgtctggagtactttcccagccagatgctgagaaccggaaacaactttgagatggtgtacaagtttgaaaacgtgcccttccactccatgtacgctcacagccagagcctggataggctgatgaacccgctgctggaccagtacctgtgggagctccagtctaccacctctggaggaactctcaaccagggcaattcagccaccaactttgccaagctgaccaaaacaaacttttctggctaccgcaaaaactggctcccggggcccatgatgaagcagcagagattctccaagactgccagtcaaaactacaagattccccagggaagaaacaacagtctgctccattatgagaccagaactaccctcgacggaagatggagcaattttgccccgggaacggccatggcaaccgcagccaacgacgccaccgacttctctcaggcccagctcatctttgcggggcccaacatcaccggcaacaccaccacagatgccaataacctgatgttcacttcagaagatgaacttagggccaccaacccccgggacactgacctgtttggccacctggcaaccaaccagcaaaacgccaccaccgttcctaccgtagacgacgtggacggagtcggcgtgtacccgggaatggtgtggcaggacagagacatttactaccaagggcccatttgggccaaaattccacacacggatggacactttcacccgtctcctctcattggcggatttggactgaaaagcccgcctccacaaatattcatcaaaaacactcctgtacccgccaatcccgcaacgaccttctctccggccagaatcaacagcttcatcacccagtacagcaccggacaggtggctgtcaaaatagaatgggaaatccagaaggagcggtccaagagatggaacccagaggtccagttcacgtccaactacggagcacaggactcgcttctctgggctcccgacaacgccggagcctacaaagagcccagggccattggatcccgatacctcaccaaccacctctag

SEQ ID NO: 2900 - DNA, 1617 bp, Bovine adeno-associated virus
atgcgtgcagcagctggcggaaatggtggcgatgcgggacaaggtgccgagggagtgggtaatgcctccggtgattggcattgcgattccacttggtcagagagccacgtcaccaccacctcaacccgcacctgggtcctgccgacctacaacaaccacctgtacctgcggctcggctcgagcaacgccagcgacaccttcaacggattctccaccccctggggatactttgactttaaccgcttccactgccacttctcgccaagagactggcaaaggctcatcaacaaccactggggactgcgccccaaaagcatgcaagtccgcatcttcaacatccaagttaaggaggtcacgacgtctaacggggagacgaccgtatccaacaacctcaccagcacggtccagatctttgcggacagcacgtacgagctcccgtacgtgatggatgcaggtcaggagggcagcttgcctcctttccccaacgacgtgttcatggtgcctcagtacgggtactgcggactggtaaccggaggcagctctcaaaaccagacagacagaaatgccttctactgtctggagtactttcccagccagatgctgagaaccggaaacaactttgagatggtgtacaagtttgaaaacgtgcccttccactccatgtacgctcacagccagagcctggataggctgatgaacccgctgctggaccagtacctgtgggagctccagtctaccacctctggaggaactctcaaccagggcaattcagccaccaactttgccaagctgaccaaaacaaacttttctggctaccgcaaaaactggctcccggggcccatgatgaagcagcagagattctccaagactgccagtcaaaactacaagattccccagggaagaaacaacagtctgctccattatgagaccagaactaccctcgacggaagatggagcaattttgccccgggaacggccatggcaaccgcagccaacgacgccaccgacttctctcaggcccagctcatctttgcggggcccaacatcaccggcaacaccaccacagatgccaataacctgatgttcacttcagaagatgaacttagggccaccaacccccgggacactgacctgtttggccacctggcaaccaaccagcaaaacgccaccaccgttcctaccgtagacgacgtggacggagtcggcgtgtacccgggaatggtgtggcaggacagagacatttactaccaagggcccatttgggccaaaattccacacacggatggacactttcacccgtctcctctcattggcggatttggactgaaaagcccgcctccacaaatattcatcaaaaacactcctgtacccgccaatcccgcaacgaccttctctccggccagaatcaacagcttcatcacccagtacagcaccggacaggtggctgtcaaaatagaatgggaaatccagaaggagcggtccaagagatggaacccagaggtccagttcacgtccaactacggagcacaggactcgcttctctgggctcccgacaacgccggagcctacaaagagcccagggccattggatcccgatacctcaccaaccacctctag

SEQ ID NO: 2901 - DNA, 1173 bp, Bovine adeno-associated virus
atggcgctggtaagctggctggtggaacatggcatcacttccgagaagcagtggattcaggagaatcaggagagctacctgtccttcaactccacgggaaactctcggagccagattaaagccgcgcttgacaacgcgtcaaaaattatgagtctgaccaaatctgcctcagactatctcgtgggacagactgttccagaggacatttctgaaaacagaatctggcagatttttgatctcaacggctacgacccggcatacgcgggctctgttctctacggctggtgcactcgcgcctttggaaagaggaacaccgtctggctgtatggacccgcgaccaccggaaagaccaacatcgcggaagccatctctcacaccgtgcccttttatggctgtgtgaactggactaatgagaactttccctttaatgactgtgtggaaaaaatgttgatctggtgggaggagggaaagatgaccagcaaggtggtggaacccgccaaggccatcttgggggggtctagagtacgagtggatcaaaaatgtaaatcctctgtacaagtagactctaccccggtgattatcacctccaatactaacatgtgtgtggtggtggatgggaactccacgacctttgaacaccagcagccgctggaagaccgcatgttcagatttgaactcatgcggcggctcccgccagattttggcaagattaccaagcaggaagtcaaagacttttttgcttgggcaaaggtcaaccaggtgccggtgactcacgagtttatggttcccaagaaagtggcgggaactgagagggcggagacttctagaaaacgcccactggatgacgtcaccaataccaactataaaagtccggagaagcgggcccggctctcagttgttcctgagacgcctcgcagttcagacgtgcctgtagagcccgctcctctgcgacctctcaactggtcttccaggtatgaatgcagatgtgactatcatgctaaatttgactctgtaacgggggaatgtgacgagtgtgaatatttgaatcggggcaaaaatggctgtatctttcataatgctacacattgtcaaatttgtcacgctgttcctccatgggaaaaggaaaatgtgtcagattttaatgattttgatgactgtaataaagagcagtaa

SEQ ID NO: 2902 - DNA, 1833 bp, Bovine adeno-associated virus
atggctaccttctatgaagtcattgttcgcgttccatttgatgtggaagagcacctgcctggaatttctgacaactttgtagactgggtaactggtcaaatttgggagctgcctcccgagtcagatttgaatttgactctgattgagcagcctcagctgacggtggctgacagaattcgccgcgtgttcctgtacgagtggaacaaattttccaagcaggagagcaaattctttgtgcagtttgaaaagggatctgaatattttcatctgcacacgctcgtggagacctccggcatctcttctatggtccttggccgctacgtgagtcagattcgcgcccagctggtgaaggtggtgttccagaacattgagccgcggattaacgactgggtcgccatcaccaaggtaaagaagggcggagccaataaggtggtggattctgggtatattcccgcctacctgctgccgaaggtccaaccagagcttcagtgggcgtggactaacctcgaagagtataaattggccgccctcaatctggaggagcgcaaacggctcgtcgctcagtttcagcttgagtcctcgcagcgctcgcaagaggcatcttcccagagggacgtttcggctgacccggtcatcaagagcaagacttcccagaaatacatggcgctggtaagctggctggtggaacatggcatcacttccgagaagcagtggattcaggagaatcaggagagctacctgtccttcaactccacgggaaactctcggagccagattaaagccgcgcttgacaacgcgtcaaaaattatgagtctgaccaaatctgcctcagactatctcgtgggacagactgttccagaggacatttctgaaaacagaatctggcagatttttgatctcaacggctacgacccggcatacgcgggctctgttctctacggctggtgcactcgcgcctttggaaagaggaacaccgtctggctgtatggacccgcgaccaccggaaagaccaacatcgcggaagccatctctcacaccgtgcccttttatggctgtgtgaactggactaatgagaactttccctttaatgactgtgtggaaaaaatgttgatctggtgggaggagggaaagatgaccagcaaggtggtggaacccgccaaggccatcttgggggggtctagagtacgagtggatcaaaaatgtaaatcctctgtacaagtagactctaccccggtgattatcacctccaatactaacatgtgtgtggtggtggatgggaactccacgacctttgaacaccagcagccgctggaagaccgcatgttcagatttgaactcatgcggcggctcccgccagattttggcaagattaccaagcaggaagtcaaagacttttttgcttgggcaaaggtcaaccaggtgccggtgactcacgagtttatggttcccaagaaagtggcgggaactgagagggcggagacttctagaaaacgcccactggatgacgtcaccaataccaactataaaagtccggagaagcgggcccggctctcagttgttcctgagacgcctcgcagttcagacgtgcctgtagagcccgctcctctgcgacctctcaactggtcttccaggtatgaatgcagatgtgactatcatgctaaatttgactctgtaacgggggaatgtgacgagtgtgaatatttgaatcggggcaaaaatggctgtatctttcataatgctacacattgtcaaatttgtcacgctgttcctccatgggaaaaggaaaatgtgtcagattttaatgattttgatgactgtaataaagagcagtaa

SEQ ID NO: 2903 - DNA, 2211 bp, Bovine adeno-associated virus
atgtcttttgttgaccaccctccagattggttggaatcgatcggcgacggctttcgtgaatttctcggccttgaggcgggtcccccgaaacccaaggccaatcaacagaagcaagataacgctcgaggtcttgtgcttcctgggtacaagtatcttggtcctgggaacggccttgataagggcgatcctgtcaattttgctgacgaggttgcccgagagcacgacctctcctaccagaaacagcttgaggcgggcgataacccttacctcaagtacaaccacgcggacgcagagtttcaggagaaactcgcttctgacacttcttttgggggaaaccttgggaaggctgttttccaggctaaaaagaggattctcgaacctcttggcctggttgagacgccggataaaacggcgcctgcggcaaaaaagaggcctctagagcagagtcctcaagagccagactcctcgagcggagttggcaagaaaggcaaacagcctgccagaaagagactcaactttgacgacgaacctggagccggagacgggcctcccccagaaggaccatcttccggagctatgtctactgagactgaaatgcgtgcagcagctggcggaaatggtggcgatgcgggacaaggtgccgagggagtgggtaatgcctccggtgattggcattgcgattccacttggtcagagagccacgtcaccaccacctcaacccgcacctgggtcctgccgacctacaacaaccacctgtacctgcggctcggctcgagcaacgccagcgacaccttcaacggattctccaccccctggggatactttgactttaaccgcttccactgccacttctcgccaagagactggcaaaggctcatcaacaaccactggggactgcgccccaaaagcatgcaagtccgcatcttcaacatccaagttaaggaggtcacgacgtctaacggggagacgaccgtatccaacaacctcaccagcacggtccagatctttgcggacagcacgtacgagctcccgtacgtgatggatgcaggtcaggagggcagcttgcctcctttccccaacgacgtgttcatggtgcctcagtacgggtactgcggactggtaaccggaggcagctctcaaaaccagacagacagaaatgccttctactgtctggagtactttcccagccagatgctgagaaccggaaacaactttgagatggtgtacaagtttgaaaacgtgcccttccactccatgtacgctcacagccagagcctggataggctgatgaacccgctgctggaccagtacctgtgggagctccagtctaccacctctggaggaactctcaaccagggcaattcagccaccaactttgccaagctgaccaaaacaaacttttctggctaccgcaaaaactggctcccggggcccatgatgaagcagcagagattctccaagactgccagtcaaaactacaagattccccagggaagaaacaacagtctgctccattatgagaccagaactaccctcgacggaagatggagcaattttgccccgggaacggccatggcaaccgcagccaacgacgccaccgacttctctcaggcccagctcatctttgcggggcccaacatcaccggcaacaccaccacagatgccaataacctgatgttcacttcagaagatgaacttagggccaccaacccccgggacactgacctgtttggccacctggcaaccaaccagcaaaacgccaccaccgttcctaccgtagacgacgtggacggagtcggcgtgtacccgggaatggtgtggcaggacagagacatttactaccaagggcccatttgggccaaaattccacacacggatggacactttcacccgtctcctctcattggcggatttggactgaaaagcccgcctccacaaatattcatcaaaaacactcctgtacccgccaatcccgcaacgaccttctctccggccagaatcaacagcttcatcacccagtacagcaccggacaggtggctgtcaaaatagaatgggaaatccagaaggagcggtccaagagatggaacccagaggtccagttcacgtccaactacggagcacaggactcgcttctctgggctcccgacaacgccggagcctacaaagagcccagggccattggatcccgatacctcaccaaccacctctag

SEQ ID NO: 2904 - DNA, 4694 bp, Bovine adeno-associated virus
gtggcactcccccccctgtcgcgttcgctcgttcgctggctcgattgggggggtggcagctcaaagagctgccagacgacggccctctgggccgtcgcccccccaatcgagccagcgaacgagcgaacgcgacaggggggggagtgccacactctctagcaagggggttttgtaggtggtgatgtcattgttgatgtcattatagttgtcacgcgatagttaatgattaacagtcatgtgatgtgtgttatccaataggatgaaagcgcgcgaatgagatctcgcgagacttccggggtataaaaggggtgagtgaacgagcccgccgccattctctgctctggactgctagaggaccctcgctgccatggctaccttctatgaagtcattgttcgcgttccatttgatgtggaagagcacctgcctggaatttctgacaactttgtagactgggtaactggtcaaatttgggagctgcctcccgagtcagatttgaatttgactctgattgagcagcctcagctgacggtggctgacagaattcgccgcgtgttcctgtacgagtggaacaaattttccaagcaggagagcaaattctttgtgcagtttgaaaagggatctgaatattttcatctgcacacgctcgtggagacctccggcatctcttctatggtccttggccgctacgtgagtcagattcgcgcccagctggtgaaggtggtgttccagaacattgagccgcggattaacgactgggtcgccatcaccaaggtaaagaagggcggagccaataaggtggtggattctgggtatattcccgcctacctgctgccgaaggtccaaccagagcttcagtgggcgtggactaacctcgaagagtataaattggccgccctcaatctggaggagcgcaaacggctcgtcgctcagtttcagcttgagtcctcgcagcgctcgcaagaggcatcttcccagagggacgtttcggctgacccggtcatcaagagcaagacttcccagaaatacatggcgctggtaagctggctggtggaacatggcatcacttccgagaagcagtggattcaggagaatcaggagagctacctgtccttcaactccacgggaaactctcggagccagattaaagccgcgcttgacaacgcgtcaaaaattatgagtctgaccaaatctgcctcagactatctcgtgggacagactgttccagaggacatttctgaaaacagaatctggcagatttttgatctcaacggctacgacccggcatacgcgggctctgttctctacggctggtgcactcgcgcctttggaaagaggaacaccgtctggctgtatggacccgcgaccaccggaaagaccaacatcgcggaagccatctctcacaccgtgcccttttatggctgtgtgaactggactaatgagaactttccctttaatgactgtgtggaaaaaatgttgatctggtgggaggagggaaagatgaccagcaaggtggtggaacccgccaaggccatcttgggggggtctagagtacgagtggatcaaaaatgtaaatcctctgtacaagtagactctaccccggtgattatcacctccaatactaacatgtgtgtggtggtggatgggaactccacgacctttgaacaccagcagccgctggaagaccgcatgttcagatttgaactcatgcggcggctcccgccagattttggcaagattaccaagcaggaagtcaaagacttttttgcttgggcaaaggtcaaccaggtgccggtgactcacgagtttatggttcccaagaaagtggcgggaactgagagggcggagacttctagaaaacgcccactggatgacgtcaccaataccaactataaaagtccggagaagcgggcccggctctcagttgttcctgagacgcctcgcagttcagacgtgcctgtagagcccgctcctctgcgacctctcaactggtcttccaggtatgaatgcagatgtgactatcatgctaaatttgactctgtaacgggggaatgtgacgagtgtgaatatttgaatcggggcaaaaatggctgtatctttcataatgctacacattgtcaaatttgtcacgctgttcctccatgggaaaaggaaaatgtgtcagattttaatgattttgatgactgtaataaagagcagtaaataaagtgagtagtcatgtcttttgttgaccaccctccagattggttggaatcgatcggcgacggctttcgtgaatttctcggccttgaggcgggtcccccgaaacccaaggccaatcaacagaagcaagataacgctcgaggtcttgtgcttcctgggtacaagtatcttggtcctgggaacggccttgataagggcgatcctgtcaattttgctgacgaggttgcccgagagcacgacctctcctaccagaaacagcttgaggcgggcgataacccttacctcaagtacaaccacgcggacgcagagtttcaggagaaactcgcttctgacacttcttttgggggaaaccttgggaaggctgttttccaggctaaaaagaggattctcgaacctcttggcctggttgagacgccggataaaacggcgcctgcggcaaaaaagaggcctctagagcagagtcctcaagagccagactcctcgagcggagttggcaagaaaggcaaacagcctgccagaaagagactcaactttgacgacgaacctggagccggagacgggcctcccccagaaggaccatcttccggagctatgtctactgagactgaaatgcgtgcagcagctggcggaaatggtggcgatgcgggacaaggtgccgagggagtgggtaatgcctccggtgattggcattgcgattccacttggtcagagagccacgtcaccaccacctcaacccgcacctgggtcctgccgacctacaacaaccacctgtacctgcggctcggctcgagcaacgccagcgacaccttcaacggattctccaccccctggggatactttgactttaaccgcttccactgccacttctcgccaagagactggcaaaggctcatcaacaaccactggggactgcgccccaaaagcatgcaagtccgcatcttcaacatccaagttaaggaggtcacgacgtctaacggggagacgaccgtatccaacaacctcaccagcacggtccagatctttgcggacagcacgtacgagctcccgtacgtgatggatgcaggtcaggagggcagcttgcctcctttccccaacgacgtgttcatggtgcctcagtacgggtactgcggactggtaaccggaggcagctctcaaaaccagacagacagaaatgccttctactgtctggagtactttcccagccagatgctgagaaccggaaacaactttgagatggtgtacaagtttgaaaacgtgcccttccactccatgtacgctcacagccagagcctggataggctgatgaacccgctgctggaccagtacctgtgggagctccagtctaccacctctggaggaactctcaaccagggcaattcagccaccaactttgccaagctgaccaaaacaaacttttctggctaccgcaaaaactggctcccggggcccatgatgaagcagcagagattctccaagactgccagtcaaaactacaagattccccagggaagaaacaacagtctgctccattatgagaccagaactaccctcgacggaagatggagcaattttgccccgggaacggccatggcaaccgcagccaacgacgccaccgacttctctcaggcccagctcatctttgcggggcccaacatcaccggcaacaccaccacagatgccaataacctgatgttcacttcagaagatgaacttagggccaccaacccccgggacactgacctgtttggccacctggcaaccaaccagcaaaacgccaccaccgttcctaccgtagacgacgtggacggagtcggcgtgtacccgggaatggtgtggcaggacagagacatttactaccaagggcccatttgggccaaaattccacacacggatggacactttcacccgtctcctctcattggcggatttggactgaaaagcccgcctccacaaatattcatcaaaaacactcctgtacccgccaatcccgcaacgaccttctctccggccagaatcaacagcttcatcacccagtacagcaccggacaggtggctgtcaaaatagaatgggaaatccagaaggagcggtccaagagatggaacccagaggtccagttcacgtccaactacggagcacaggactcgcttctctgggctcccgacaacgccggagcctacaaagagcccagggccattggatcccgatacctcaccaaccacctctagcccaattctgttgcataccctcaataaaccgtgtattcgtttcagtaaaatactgcctcttgtggtcattcggcgtacaacagcttacaacaacaacaaaacccccttgctagagagtgtggcactcccccccctgtcgcgttcgctcgttcgctggctcgattgggggggtggcagctcaaagagctgccagacgacggccctctgggccgtcgcccccccaatcgagccagcgaacgagcgaacgcgacaggggggggagtgccac

SEQ ID NO: 2905 - protein, 390 aa, Bovine adeno-associated virus
MALVSWLVEHGITSEKQWIQENQESYLSFNSTGNSRSQIKAALDNASKIMSLTKSASDYLVGQTVPEDISENRIWQIFDLNGYDPAYAGSVLYGWCTRAFGKRNTVWLYGPATTGKTNIAEAISHTVPFYGCVNWTNENFPFNDCVEKMLIWWEEGKMTSKVVEPAKAILGGSRVRVDQKCKSSVQVDSTPVIITSNTNMCVVVDGNSTTFEHQQPLEDRMFRFELMRRLPPDFGKITKQEVKDFFAWAKVNQVPVTHEFMVPKKVAGTERAETSRKRPLDDVTNTNYKSPEKRARLSVVPETPRSSDVPVEPAPLRPLNWSSRYECRCDYHAKFDSVTGECDECEYLNRGKNGCIFHNATHCQICHAVPPWEKENVSDFNDFDDCNKEQ

SEQ ID NO: 2906 - protein, 610 aa, Bovine adeno-associated virus
MATFYEVIVRVPFDVEEHLPGISDNFVDWVTGQIWELPPESDLNLTLIEQPQLTVADRIRRVFLYEWNKFSKQESKFFVQFEKGSEYFHLHTLVETSGISSMVLGRYVSQIRAQLVKVVFQNIEPRINDWVAITKVKKGGANKVVDSGYIPAYLLPKVQPELQWAWTNLEEYKLAALNLEERKRLVAQFQLESSQRSQEASSQRDVSADPVIKSKTSQKYMALVSWLVEHGITSEKQWIQENQESYLSFNSTGNSRSQIKAALDNASKIMSLTKSASDYLVGQTVPEDISENRIWQIFDLNGYDPAYAGSVLYGWCTRAFGKRNTVWLYGPATTGKTNIAEAISHTVPFYGCVNWTNENFPFNDCVEKMLIWWEEGKMTSKVVEPAKAILGGSRVRVDQKCKSSVQVDSTPVIITSNTNMCVVVDGNSTTFEHQQPLEDRMFRFELMRRLPPDFGKITKQEVKDFFAWAKVNQVPVTHEFMVPKKVAGTERAETSRKRPLDDVTNTNYKSPEKRARLSVVPETPRSSDVPVEPAPLRPLNWSSRYECRCDYHAKFDSVTGECDECEYLNRGKNGCIFHNATHCQICHAVPPWEKENVSDFNDFDDCNKEQ

SEQ ID NO: 2907 - protein, 538 aa, Bovine adeno-associated virus
MRAAAGGNGGDAGQGAEGVGNASGDWHCDSTWSESHVTTTSTRTWVLPTYNNHLYLRLGSSNASDTFNGFSTPWGYFDFNRFHCHFSPRDWQRLINNHWGLRPKSMQVRIFNIQVKEVTTSNGETTVSNNLTSTVQIFADSTYELPYVMDAGQEGSLPPFPNDVFMVPQYGYCGLVTGGSSQNQTDRNAFYCLEYFPSQMLRTGNNFEMVYKFENVPFHSMYAHSQSLDRLMNPLLDQYLWELQSTTSGGTLNQGNSATNFAKLTKTNFSGYRKNWLPGPMMKQQRFSKTASQNYKIPQGRNNSLLHYETRTTLDGRWSNFAPGTAMATAANDATDFSQAQLIFAGPNITGNTTTDANNLMFTSEDELRATNPRDTDLFGHLATNQQNATTVPTVDDVDGVGVYPGMVWQDRDIYYQGPIWAKIPHTDGHFHPSPLIGGFGLKSPPPQIFIKNTPVPANPATTFSPARINSFITQYSTGQVAVKIEWEIQKERSKRWNPEVQFTSNYGAQDSLLWAPDNAGAYKEPRAIGSRYLTNHL

SEQ ID NO: 2908 - protein, 736 aa, Artificial Sequence
  Synthetic polypeptide
MSFVDHPPDWLESIGDGFREFLGLEAGPPKPKANQQKQDNARGLVLPGYKYLGPGNGLDKGDPVNFADEVAREHDLSYQKQLEAGDNPYLKYNHADAEFQEKLASDTSFGGNLGKAVFQAKKRILEPLGLVETPDKTAPAAKKRPLEQSPQEPDSSSGVGKKGKQPARKRLNFDDEPGAGDGPPPEGPSSGAMSTETEMRAAAGGNGGDAGQGAEGVGNASGDWHCDSTWSESHVTTTSTRTWVLPTYNNHLYLRLGSSNASDTFNGFSTPWGYFDFNRFHCHFSPRDWQRLINNHWGLRPKSMQVRIFNIQVKEVTTSNGETTVSNNLTSTVHIFADSTYELPYVMDAGQEGSLPPFPNDVFMVPQYGYCGLVTGGSSQNQTDRNAFYCLEYFPSQMLRTGNNFEMVYKFENVPFHSMYAHSQSLDRLMNPLLDQYLWELQSTTSGGTLNQGNSATNFAKLTNKNFSGYRKNWLPGPMMKQQRFSKTASQNYKIPQGGNNSLLHYETRTTLDRRWSNFAPGTAMATAANDATDFSQAQLIFAGPNITGNTTTDANNLMFTSEDELRATNPRDTDLFGHLATNQQNATTVPTVDDVDGVGVYPGMVWQDRDIYYQGPIWAKIPHTDGHFHPSPLIGGFGLKSPPPQIFIKNTPVPANPATTFSPARINSFITQYSTGQVAVKIEWEIQKERSKRWNPEVQFTSNYGAQDSLLWAPDNAGAYKEPRAIGSRYLTNHL

SEQ ID NO: 2909 - protein, 736 aa, Artificial Sequence
  Synthetic polypeptide
MSFVDHPPDWLESIGDGFREFLGLEAGPPKPKANQQKQDNARGLVLPGYKYLGPGNGLDKGDPVNFADEVAREHDLSYQKQLEAGDNPYLKYNHADAEFQEKLASDTSFGGNLGKAVFQAKKRILEPLGLVETPDKTAPAAKKRPLEQSPQEPDSSSGVGKKGKQPARKRLNFDDEPGAGDGPPPEGPSSGAMSTETEMRAAAGGNGGDAGQGAEGVGNASGDWHCDSTWSESHVTTTSTRTWVLPTYNNHLYLRLGSSNASDTFNGFSTPWGYFDFNRFHCHFSPRDWQRLINNHWGLRPKSMQVRIFNIQVKEVTTSNGETTVSNNLTSTVQIFADSTYELPYVMDAGQEGSLPPFPNDVFMVPQYGYCGLVTGGSSQNQTDRNAFYCLEYFPSQMLRTGNNFEMVYKFENVPFHSMYAHSQSLDRLMNPLLDQYLWELQSTTSGGTLNQGNSATNFAKLTKTNFSGYRKNWLPGPMMKQQRFSKTASQNYKIPQGRNNSLLHYETRTTLDGRWSNFAPGTAMATAANDATDFSQAQLIFAGPNITGNTTTDANNLMFTSEDELRATNPRDTDLFGHLATNQQNATTVPTVDDVDGVGVYPGMVWQDRDIYYQGPIWAKIPHTDGHFHPSPLIGGFGLKSPPPQIFIKNTPVPANPATTFSPARINSFITQYSTGQVAVKIEWEIQKERSKRWNPEVQFTSNYGAQDSLLWAPDNAGAYKEPRAIGSRYLTNHL

SEQ ID NO: 2910 - protein, 736 aa, Bovine adeno-associated virus; identical to SEQ ID NO: 2909

SEQ ID NO: 2911 - protein, 600 aa, Bovine adeno-associated virus
TAPAAKKRPLEQSPQEPDSSSGVGKKGKQPARKRLNFDDEPGAGDGPPPEGPSSGAMSTETEMRAAAGGNGGDAGQGAEGVGNASGDWHCDSTWSESHVTTTSTRTWVLPTYNNHLYLRLGSSNASDTFNGFSTPWGYFDFNRFHCHFSPRDWQRLINNHWGLRPKSMQVRIFNIQVKEVTTSNGETTVSNNLTSTVQIFADSTYELPYVMDAGQEGSLPPFPNDVFMVPQYGYCGLVTGGSSQNQTDRNAFYCLEYFPSQMLRTGNNFEMVYKFENVPFHSMYAHSQSLDRLMNPLLDQYLWELQSTTSGGTLNQGNSATNFAKLTKTNFSGYRKNWLPGPMMKQQRFSKTASQNYKIPQGRNNSLLHYETRTTLDGRWSNFAPGTAMATAANDATDFSQAQLIFAGPNITGNTTTDANNLMFTSEDELRATNPRDTDLFGHLATNQQNATTVPTVDDVDGVGVYPGMVWQDRDIYYQGPIWAKIPHTDGHFHPSPLIGGFGLKSPPPQIFIKNTPVPANPATTFSPARINSFITQYSTGQVAVKIEWEIQKERSKRWNPEVQFTSNYGAQDSLLWAPDNAGAYKEPRAIGSRYLTNHL

SEQ ID NO: 2912 - DNA, 2214 bp, Artificial Sequence
  Synthetic polynucleotide
atggctgccgatggttatcttccagattggctcgaggacactctctctgaaggaataagacagtggtggaagctcaaacctggcccaccaccaccaaagcccgcagagcggcataaggacgacagcaggggtcttgtgcttcctgggtacaagtacctcggacccttcaacggactcgacaagggagagccggtcaacgaggcagacgccgcggccctcgagcacgacaaagcctacgaccggcagctcgacagcggagacaacccgtacctcaagtacaaccacgccgacgcggagtttcaggagcgccttaaagaagatacgtcttttgggggcaacctcgggcgagcagtcttccaggccaaaaagaggcttcttgaacctcttggtctggttgaggaagcggctaagacggctcctggaaagaagaggcctgtagagcagtctcctcaggaaccggactcctcctcgggcatcggcaagacaggccagcagcccgctaaaaagagactcaatttcggtcagactggcgacacagagtcagtcccagaccctcaaccaatcggagaacctcccgcagccccctcaggtgtgggatctcttacaatggcttcaggtggtggcgcaccagtggcagacaataacgaaggtgccgatggagtgggtagttcctcgggaaattggcattgcgattcccaatggctgggggacagagtcatcaccaccagcacccgaacctgggccctgcccacctacaacaatcacctctacaagcaaatctccaacgggacatcgggaggagccaccaacgacaacacctacttcggctacagcaccccctgggggtattttgactttaacagattccactgccacttttcaccacgtgactggcagcgactcatcaacaacaactggggattccggcccaagagactcagcttcaagctcttcaacatccaggtcaaggaggtcacgcagaatgaaggcaccaagaccatcgccaataaccttaccagcacggtccaggtcttcacggactcggagtaccagctgccgtacgttctcggctctgcccaccagggctgcctgcctccgttcccggcggacgtgttcatgattccccagtacggctacctaacactcaacaacggtagtcaggccgtgggacgctcctccttctactgcctggaatactttccttcgcagatgctgagaaccggcaacaacttccagtttacttacaccttcgaggacgtgcctttccacagcagctacgcccacagccagagcttggaccggctgatgaatcctctgattgaccagtacctgtactacttgtctcggactcaaacaacaggaggcacggcaaatacgcagactctgggcttcagccaaggtgggcctaatacaatggccaatcaggcaaagaactggctgccaggaccctgttaccgccaacaacgcgtctcaacgacaaccgggcaaaacaacaatagcaactttgcctggactgctgggaccaaataccatctgaatggaagaaattcattggctaatcctggcatcgctatggcaacacacaaagacgacaaggagcgtttttttcccagtaacgggatcctgatttttggcaaacaaaatgctgccagagacaatgcggattacagcgatgtcatgctcaccagcgaggaagaaatcaaaaccactaaccctgtggctacagaggaatacggtatcgtggcagataacttgcagcagcaaaacacggctcctcaaattggaactgtcaacagccagggggccttacccggtatggtttggcagaaccgggacgtgtacctgcagggtcccatctgggccaagattcctcacacggacggcaacttccacccgtctccgctgatgggcggctttggcctgaaacatcctccgcctcagatcctgatcaagaacacgcctgtacctgcggatcctccgaccaccttcaaccagtcaaagctgaactctttcatcacgcaatacagcaccggacaggtcagcgtggaaattgaatgggagctgcagaaggaaaacagcaagcgctggaaccccgagatccagtacacctccaactactacaaatctacaagtgtggactttgctgttaatacagaaggcgtgtactctgaaccccaccccattggcacccgttacctcacccgtcccctgtaa

SEQ ID NO: 2913 - protein, 737 aa, Artificial Sequence
  Synthetic polypeptide
MAADGYLPDWLEDTLSEGIRQWWKLKPGPPPPKPAERHKDDSRGLVLPGYKYLGPFNGLDKGEPVNEADAAALEHDKAYDRQLDSGDNPYLKYNHADAEFQERLKEDTSFGGNLGRAVFQAKKRLLEPLGLVEEAAKTAPGKKRPVEQSPQEPDSSSGIGKTGQQPAKKRLNFGQTGDTESVPDPQPIGEPPAAPSGVGSLTMASGGGAPVADNNEGADGVGSSSGNWHCDSQWLGDRVITTSTRTWALPTYNNHLYKQISNGTSGGATNDNTYFGYSTPWGYFDFNRFHCHFSPRDWQRLINNNWGFRPKRLSFKLFNIQVKEVTQNEGTKTIANNLTSTVQVFTDSEYQLPYVLGSAHQGCLPPFPADVFMIPQYGYLTLNNGSQAVGRSSFYCLEYFPSQMLRTGNNFQFTYTFEDVPFHSSYAHSQSLDRLMNPLIDQYLYYLSRTQTTGGTANTQTLGFSQGGPNTMANQAKNWLPGPCYRQQRVSTTTGQNNNSNFAWTAGTKYHLNGRNSLANPGIAMATHKDDKERFFPSNGILIFGKQNAARDNADYSDVMLTSEEEIKTTNPVATEEYGIVADNLQQQNTAPQIGTVNSQGALPGMVWQNRDVYLQGPIWAKIPHTDGNFHPSPLMGGFGLKHPPPQILIKNTPVPADPPTTFNQSKLNSFITQYSTGQVSVEIEWELQKENSKRWNPEIQYTSNYYKSTSVDFAVNTEGVYSEPHPIGTRYLTRPL

SEQ ID NO: 2914 - protein, 736 aa, Artificial Sequence
  Synthetic polypeptide
MAADGYLPDWLEDNLSEGIREWWDLKPGAPKPKANQQKQDDGRGLVLPGYKYLGPFNGLDKGEPVNAADAAALEHDKAYDQQLKAGDNPYLRYNHADAEFQERLQEDTSFGGNLGRAVFQAKKRVLEPLGLVEEGAKTAPGKKRPVEQSPQEPDSSSGIGKTGQQPAKKRLNFGQTGDTESVPDPQPIGEPPAAPSGVGSLTMASGGGAPVADNNEGADGVGSSSGNWHCDSQWLGDRVITTSTRTWALPTYNNHLYKQISSASTGASNDNHYFGYSTPWGYFDFNRFHCHFSPRDWQRLINNNWGFRPKRLNFKLFNIQVKEVTDNNGVKTIANNLTSTVQVFTDSDYQLPYVLGSAHQGCLPPFPADVFMIPQYGYLTLNNGSQAVGRSSFYCLEYFPSQMLRTGNNFQFTYTFEDVPFHSSYAHSQSLDRLMNPLIDQYLYYLSRTQTTGGTANTQTLGFSQGGPNTMANQAKNWLPGPCYRQQRVSTTTGQNNNSNFAWTAGTKYHLNGRNSLANPGIAMATHKDDKERFFPSNGILIFGKQNAARDNADYSDVMLTSEEEIKTTNPVATEEYGIVADNLQQQNTAPQIGTVNSQGALPGMVWQNRDVYLQGPIWAKIPHTDGNFHPSPLMGGFGLKHPPPQILIKNTPVPADPPTTFNQSKLNSFITQYSTGQVSVEIEWELQKENSKRWNPEIQYTSNYYKSTSVDFAVNTEGVYSEPHPIGTRYLTRPL

SEQ ID NO: 2915 - protein, 736 aa, Artificial Sequence
  Synthetic polypeptide
MAADGYLPDWLEDTLSEGIRQWWKLKPGPPPPKPAERHKDDSRGLVLPGYKYLGPFNGLDKGEPVNEADAAALEHDKAYDRQLDSGDNPYLKYNHADAEFQERLQGDTSFGGNLGRAVFQAKKRVLEPLGLVEEGAKTAPGKKRPVEQSPQEPDSSSGIGETGQQPAKKRLNFGQTGDSESVPDPQPLGEPPATPAAVGPTTMASGGGAPMADNNEGADGVGSSSGNWHCDSQWLGDRVITTSTRTWALPTYNNHLYKQISSASTGASNDNHYFGYSTPWGYFDFNRFHCHFSPRDWQRLINNNWGFRPKRLSFKLFNIQVKEVTDNNGVKTIANNLTSTVQVFTDSEYQLPYVLGSAHQGCLPPFPADVFMIPQYGYLTLNNGSQAVGRSSFYCLEYFPSQMLRTGNNFTFSYTFEDVPFHSSYAHSQSLDRLMNPLIDQYLYYLSRTQTTGGTANTQTLGFSQGGPNTMANQAKNWLPGPCYRQQRVSTTTGQNNNSNFAWTAGTKYHLNGRNSLANPGIAMATHKDDKERFFPSNGILIFGKQNAARDNADYSDVMLTSEEEIKTTNPVATEEYGIVADNLQQQNTAPQIGTVNSQGALPGMVWQNRDVYLQGPIWAKIPHTDGNFHPSPLMGGFGLKHPPPQILIKNTPVPADPPTTFNQSKLNSFITQYSTGQVSVEIEWELQKENSKRWNPEIQYTSNYYKSTSVDFAVNTEGVYSEPHPIGTRYLTRPL

SEQ ID NO: 2916 - DNA, 2181 bp, Artificial Sequence
  Synthetic polynucleotide
atgtcttttgttgatcaccctccagattggttggaagaagttggtgaaggtcttcgcgagtttttgggccttgaagcgggcccaccgaaaccaaaacccaatcagcagcatcaagatcaagcccgtggtcttgtgctgcctggttataactatctcggacccggaaacggtctcgatcgaggagagcctgtcaacagggcagacgaggtcgcgcgagagcacgacatctcgtacaacgagcagcttgaggcgggagacaacccctacctcaagtacaaccacgcggacgccgagtttcaggagaagctcgccgacgacacatccttcgggggaaacctcggaaaggcagtctttcaggccaagaaaagggttctcgaaccttttggcctggttgaagagggtgctaagacggcccctaccggaaagcggatagacgaccactttccaaaaagaaagaaggctcggaccgaagaggactccaagccttccacctcgtcagacgccgaagctggacccagcggatcccagcagctgcaaatcccagcacaaccagcctcaagtttgggagctgatacaatgtctgcgggaggtggcggcccattgggcgacaataaccaaggtgccgatggagtgggcaatgcctcgggagattggcattgcgattccacgtggatgggggacagagtcgtcaccaagtccacccgcacctgggtgctgcccagctacaacaaccaccagtaccgagagatcaaaagcggctccgtcgacggaagcaacgccaacgcctactttggatacagcaccccctgggggtactttgactttaaccgcttccacagccactggagcccccgagactggcaaagactcatcaacaactattggggcttcagaccccggtctctcagagtcaaaatcttcaacatccaagtcaaagaggtcacggtgcaggactccaccaccaccatcgccaacaacctcacctccaccgtccaagtgtttacggacgacgactaccaactcccgtacgtcgtcggcaacgggaccgagggatgcctgccggccttccccccgcaggtctttacgctgccgcagtacggctacgcgacgctgaaccgagacaacggagacaacccgacagagcggagcagcttcttttgcctagagtactttcccagcaagatgctgaggacgggcaacaactttgagtttacctacagctttgaagaggtgcccttccactgcagcttcgccccgagccagaacctctttaagctggccaacccgctggtggaccagtacctgtaccgcttcgtgagcacctcggccacgggcgccatccagttccaaaagaacctggcgggcagatacgccaacacctacaaaaactggttcccggggcccatgggccgaacccagggctggaacacgagctctggggtcagcagcaccaacagagtcagcgtcaacaacttttccgtctcaaaccggatgaacctggagggggccagctaccaagtgaacccccagcccaacgggatgacaaacacgctccaaggcagcaaccgctacgcgctggaaaacaccatgatcttcaacgctcaaaacgccacgccgggaactacctcggtgtacccagaggacaatctactgctgaccagcgagagcgagactcagcccgtcaaccgggtggcttacaacacgggcggtcagatggccaccaacgcccagaacgccaccacggctcccacggtcgggacctacaacctccaggaagtgcttcctggcagcgtatggatggagagggacgtgtacctccaaggacccatctgggccaagatcccagagacgggggcgcactttcacccctctccggccatgggcggattcggactcaaacacccgccgcccatgatgctcatcaaaaacacgccggtgcccggcaacatcaccagcttctcggacgtgcccgtcagcagcttcatcacccagtacagcaccgggcaggtcaccgtggagatggaatgggagctcaaaaaggaaaactccaagaggtggaacccagagatccagtacaccaacaactacaacgacccccagtttgtggactttgctccagacggctccggcgaatacagaaccaccagagccatcggaacccgatacctcacccgacccctt

SEQ ID NO: 2917 - protein, 726 aa, Artificial Sequence
  Synthetic polypeptide
MSFVDHPPDWLEEVGEGLREFLGLEAGPPKPKPNQQHQDQARGLVLPGYNYLGPGNGLDRGEPVNRADEVAREHDISYNEQLEAGDNPYLKYNHADAEFQEKLADDTSFGGNLGKAVFQAKKRVLEPFGLVEEGAKTAPTGKRIDDHFPKRKKARTEEDSKPSTSSDAEAGPSGSQQLQIPAQPASSLGADTMSAGGGGPLGDNNQGADGVGNASGDWHCDSTWMGDRVVTKSTRTWVLPSYNNHQYREIKSGSVDGSNANAYFGYSTPWGYFDFNRFHSHWSPRDWQRLINNYWGFRPRSLRVKIFNIQVKEVTVQDSTTTIANNLTSTVQVFTDDDYQLPYVVGNGTEGCLPAFPPQVFTLPQYGYATLNRDNGDNPTERSSFFCLEYFPSKMLRTGNNFEFTYSFEEVPFHCSFAPSQNLFKLANPLVDQYLYRFVSTSATGAIQFQKNLAGRYANTYKNWFPGPMGRTQGWNTSSGSSTNRVSVNNFSVSNRMNLEGASYQVNPQPNGMTNTLQGSNRYALENTMIFNAQNATPGTTSVYPEDNLLLTSESETQPVNRVAYNTGGQMATNAQNATTAPTVGTYNLQEVLPGSVWMERDVYLQGPIWAKIPETGAHFHPSPAMGGFGLKHPPPMMLIKNTPVPGNITSFSDVPVSSFITQYSTGQVTVEMEWELKKENSKRWNPEIQYTNNYNDPQFVDFAPDGSGEYRTTRAIGTRYLTRPL

SEQ ID NO: 2918 - protein, 735 aa, Artificial Sequence
  Synthetic polypeptide
MAADGYLPDWLEDTLSEGIRQWWKLKPGPPPPKPAERHKDDSRGLVLPGYKYLGPFNGLDKGEPVNEADAAALEHDKAYDRQLDSGDNPYLKYNHADAEFQERLKEDTSFGGNLGRAVFQAKKRILEPLGLVEEPVKTAPGKKRPVEHSPAEPDSSSGTGKSGQQPARKRLNFGQTGDADSVPDPQPLGQPPAAPSGLGTNTMASGSGAPMADNNEGADGVGNSSGNWHCDSTWMGDRVITTSTRTWALPTYNNHLYKQISSQSGASNDNHYFGYSTPWGYFDFNRFHCHFSPRDWQRLINNNWGFRPKRLSFKLFNIQVKEVTQNDGTTTIANNLTSTVQVFTDSEYQLPYVLGSAHQGCLPPFPADVFMVPQYGYLTLNNGSQAVGRSSFYCLEYFPSQMLRTGNNFTFSYTFEDVPFHSSYAHSQSLDRLMNPLIDQYLYYLSRTNTPSGTTTMSRLQFSQAGASDIRDQSRNWLPGPCYRQQRVSKTAADNNNSDYSWTGATKYHLNGRDSLVNPGPAMASHKDDEEKYFPQSGVLIFGKQDSGKTNVDIEKVMITDEEEIRTTNPVATEQYGSVSTNLQSGNTQAATSDVNTQGVLPGMVWQDRDVYLQGPIWAKIPHTDGHFHPSPLMGGFGLKHPPPQILIKNTPVPANPSTTFSAAKFASFITQYSTGQVSVEIEWELQKENSKRWNPEIQYTSNYNKSVNVDFTVDTNGVYSEPRPIGTRYLTRNL

SEQ ID NO: 2919 - DNA, 1797 bp, Artificial Sequence
  Synthetic polynucleotide
acggctccgaccggagacaagcggaaaggcgaagacgaacctcgtttgcccgacacttcttcacagactcccaagaaaaacaagaagcctcgcaaggaaagaccttccggcggggcagaagatccgggcgaaggcacctcttccaacgctggagcagcagcacccgcctctagtgtgggatcatctatcatggctgaaggaggtggcggcccagtgggcgatgcaggccagggtgccgatggagtgggcaattcctccggaaattggcattgcgattcccaatggctggaaaacggagtcgtcactcgaaccacccgaacctgggtcttgcccagctacaacaaccacctgtacaaacgaatccaaggacccagcggaggcgacaacaacaacaaattctttggattcagcaccccctggggatactttgactacaatcgattccactgccacttttccccgcgagactggcaacgactcatcaacaacaactggggcatccgtcccaaagcgatgcgctttagactctttaacatccaggttaaagaggtcacggtccaagacttcaacaccaccatcggcaacaacctcaccagtacggtccaggtctttgcggacaaggactaccaactgccgtacgtcctcggatcggctaccgaaggcaccttcccgccgttcccagcggatatctacacgatcccgcagtacgggtactgcacgctaaactacaacaacgaggcggtggatcgttcggccttctactgtctggactactttccctcagacatgctgcggacaggaaataactttgagtttacttacaccttcgaggacgttcctttccatagcatgtttgcccacaaccagacgctagaccggctgatgaatcccctcgtggatcagtacctctgggctttcagctccgtcagccaagcaggctcatctggacgagctcttcattactcgcgggcgactaaaaccaacatggcggctcaatataggaactggttacctgggcctttcttccgtgatcagcaaatctttacgggcgctagcaacatcactaaaaataacgtctttagcgtttgggaaaaaggcaagcaatgggaactcgacaatcggaccaacctaatgcagcccggtcctgcggcagcgaccacctttagcggagaacctgaccgtcaagccatgcaaaacacgctggcttttagcaggaccgtctacgatcaaacgaccgccacgaccgatcgtaaccagatactcatcaccaacgaagacgaaatcagacccaccaactcggtcggtatcgacgcgtggggagcagttcccaccaacaaccagtcgatcgtgacccccggcactcgcgcggccgtcaacaatcaaggggcgcttcccgggatggtgtggcaaaacagagacatttaccctacagggacccatttggccaaaattcccgacactgacaatcacttccatccgtccccgcttattgggcggtttggctgcaagcatccccctccccagattttcattaaaaacacacccgtccctgccaacccttcggaaacgttccagacggccaaagtggcctccttcatcaaccagtactcgaccggacagtgcaccgtcgaaatcttttgggaactcaagaaggaaacctccaagcgctggaaccccgaaatccagttcacctccaactttggcaacgcggccgacatccagtttgccgtctccgacacgggatcctattccgaacctcgtcccatcggtacccgttaccttaccaaacctctgtaa

SEQ ID NO: 2920 - DNA, 1989 bp, Artificial Sequence
  Synthetic polynucleotide
atgaggtcgtactacgaggtcatcgttcagctgcccaacgacgtcgagagtcaggtacctggaatctccgattcgttcgtcaactggattacgtcgcgagaatggacgttgcctgaggacgccgattgggatttggaccaggtcgatcaagttcaactgacgctcggcgacaaaatccaacgggagattcgaactcattgggggacgatggccaaagaaccggactttcactattttatccaactggaacaaggtgaggtgttctttcatttacacgtcctgctggaaacgtgttccgtaaagccgatggtactcggaagatatatccgacatattcaacaaaaaattgtgagtaaagtctactgcgccacgagcctacgatggaaggatggatgcgtggtgaccaagaccaaaaatttcgggggcgcgaacaaggtccgggccgagtcgtatattcccgcctacctgatcccgaaacagcaaccggaagtgcagtgggcgtggactaacgtgcccgagtatataaaagcgtgcttgcaccgagaactgcgtgccagtctcgcgcgacttcacttcgaggaggcgggcgtctcgcaatccaaggaaaatctcgcgagaactgcagacggcgctcccgtgatgccgacccgcgtcagcaaacgctacatggagctcgtggattggctcgtggagaaggggatcaccaccgagaaggaatggctgctggaaaacagagaaagctttcggagctttcaggcctcgagcaactcggcgcgtcagatcaagacggccctgcaaggcgccattcaggagatgcttctgaccaagacggcggaggactacctcgtcggaaaggatcccgtctcggacgacgacatccgtcagaaccgcatctacaagattctggaactgaaccactacgacccagcgtacgtggggagtattttggtcgggtggtgccagaagaaatggggcaagcgaaacacgctgtggctgttcggacatgcgaccaccggcaagaccaacatcgcggaggctattgcccatgctgtgccgttctatggatgcgttaactggaccaacgagaactttccgttcaacgactgcgtcgaaaaaatgattatctggtgggaggagggcaaaatgaccgccaaagtggtggaaacagccaaggcgattctgggaggatctcgggtgagagtggaccaaaaatgcaaagcttcggttccgatcgaaccgacgccggtcattattaccagtaacaccaacatgtgttatgtcatcgacgggaacacgaccacgttcgagcataagcagccgttggaggacaggatgtttaagctcgaattgctgactcggttgcctgatgactttggtaaggtgaccaaacaggaggtgcgtcaattcttcaggtggtctcaggatcacctgacccctgtgatcccagaattcctagtgcggaaggcggagtctcgcaaaagacccgccccttccggggaaggctatataagcccgacaaagcggcccgcgctcgcagagcagcagcaggcgtcggagagcgcggacccggttcccaccaggtatcgtatcaaatgctcgaaacattgcggtatggataaaatgttgtttccttgccaaatttgtgaatcgatgaacagagatattaatatttgtgctattcataaaacgaccgactgtaaagagtgtttccccgactacggggataaagatgatgtagaactacccccctgtacagaacacaacgtgtctcgttgttatcaatgtcattcgggcgaattgtatcgcgtgacttcggactctgacgagaaacctgcccccgagagtgatgaaggcaccgagccatcctatgctccctgcacgattcaccacctgatgggcaagagtcacgggttagtcacttgcgcggcgtgtcggttgaaaaatagtacgttgcatgatgacttggatgacggtgatctcgaacaataa

SEQ ID NO: 2921 - DNA, 1626 bp, Artificial Sequence
  Synthetic polynucleotide
atgaggtcgtactacgaggtcatcgttcagctgcccaacgacgtcgagagtcaggtacctggaatctccgattcgttcgtcaactggattacgtcgcgagaatggacgttgcctgaggacgccgattgggatttggaccaggtcgatcaagttcaactgacgctcggcgacaaaatccaacgggagattcgaactcattgggggacgatggccaaagaaccggactttcactattttatccaactggaacaaggtgaggtgttctttcatttacacgtcctgctggaaacgtgttccgtaaagccgatggtactcggaagatatatccgacatattcaacaaaaaattgtgagtaaagtctactgcgccacgagcctacgatggaaggatggatgcgtggtgaccaagaccaaaaatttcgggggcgcgaacaaggtccgggccgagtcgtatattcccgcctacctgatcccgaaacagcaaccggaagtgcagtgggcgtggactaacgtgcccgagtatataaaagcgtgcttgcaccgagaactgcgtgccagtctcgcgcgacttcacttcgaggaggcgggcgtctcgcaatccaaggaaaatctcgcgagaactgcagacggcgctcccgtgatgccgacccgcgtcagcaaacgctacatggagctcgtggattggctcgtggagaaggggatcaccaccgagaaggaatggctgctggaaaacagagaaagctttcggagctttcaggcctcgagcaactcggcgcgtcagatcaagacggccctgcaaggcgccattcaggagatgcttctgaccaagacggcggaggactacctcgtcggaaaggatcccgtctcggacgacgacatccgtcagaaccgcatctacaagattctggaactgaaccactacgacccagcgtacgtggggagtattttggtcgggtggtgccagaagaaatggggcaagcgaaacacgctgtggctgttcggacatgcgaccaccggcaagaccaacatcgcggaggctattgcccatgctgtgccgttctatggatgcgttaactggaccaacgagaactttccgttcaacgactgcgtcgaaaaaatgattatctggtgggaggagggcaaaatgaccgccaaagtggtggaaacagccaaggcgattctgggaggatctcgggtgagagtggaccaaaaatgcaaagcttcggttccgatcgaaccgacgccggtcattattaccagtaacaccaacatgtgttatgtcatcgacgggaacacgaccacgttcgagcataagcagccgttggaggacaggatgtttaagctcgaattgctgactcggttgcctgatgactttggtaaggtgaccaaacaggaggtgcgtcaattcttcaggtggtctcaggatcacctgacccctgtgatcccagaattcctagtgcggaaggcggagtctcgcaaaagacccgccccttccggggaaggctatataagcccgacaaagcggcccgcgctcgcagagcagcagcaggcgtcggagagcgcggacccggttcccaccagattggttggagcggttggtcaaaaagggagtgaatgctgcagctga

SEQ ID NO: 2922 - DNA, 1323 bp, Artificial Sequence
  Synthetic polynucleotide
atggagctcgtggattggctcgtggagaaggggatcaccaccgagaaggaatggctgctggaaaacagagaaagctttcggagctttcaggcctcgagcaactcggcgcgtcagatcaagacggccctgcaaggcgccattcaggagatgcttctgaccaagacggcggaggactacctcgtcggaaaggatcccgtctcggacgacgacatccgtcagaaccgcatctacaagattctggaactgaaccactacgacccagcgtacgtggggagtattttggtcgggtggtgccagaagaaatggggcaagcgaaacacgctgtggctgttcggacatgcgaccaccggcaagaccaacatcgcggaggctattgcccatgctgtgccgttctatggatgcgttaactggaccaacgagaactttccgttcaacgactgcgtcgaaaaaatgattatctggtgggaggagggcaaaatgaccgccaaagtggtggaaacagccaaggcgattctgggaggatctcgggtgagagtggaccaaaaatgcaaagcttcggttccgatcgaaccgacgccggtcattattaccagtaacaccaacatgtgttatgtcatcgacgggaacacgaccacgttcgagcataagcagccgttggaggacaggatgtttaagctcgaattgctgactcggttgcctgatgactttggtaaggtgaccaaacaggaggtgcgtcaattcttcaggtggtctcaggatcacctgacccctgtgatcccagaattcctagtgcggaaggcggagtctcgcaaaagacccgccccttccggggaaggctatataagcccgacaaagcggcccgcgctcgcagagcagcagcaggcgtcggagagcgcggacccggttcccaccaggtatcgtatcaaatgctcgaaacattgcggtatggataaaatgttgtttccttgccaaatttgtgaatcgatgaacagagatattaatatttgtgctattcataaaacgaccgactgtaaagagtgtttccccgactacggggataaagatgatgtagaactacccccctgtacagaacacaacgtgtctcgttgttatcaatgtcattcgggcgaattgtatcgcgtgacttcggactctgacgagaaacctgcccccgagagtgatgaaggcaccgagccatcctatgctccctgcacgattcaccacctgatgggcaagagtcacgggttagtcacttgcgcggcgtgtcggttgaaaaatagtacgttgcatgatgacttggatgacggtgatctcgaacaataa

SEQ ID NO: 2923 - DNA, 960 bp, Artificial Sequence
  Synthetic polynucleotide
atggagctcgtggattggctcgtggagaaggggatcaccaccgagaaggaatggctgctggaaaacagagaaagctttcggagctttcaggcctcgagcaactcggcgcgtcagatcaagacggccctgcaaggcgccattcaggagatgcttctgaccaagacggcggaggactacctcgtcggaaaggatcccgtctcggacgacgacatccgtcagaaccgcatctacaagattctggaactgaaccactacgacccagcgtacgtggggagtattttggtcgggtggtgccagaagaaatggggcaagcgaaacacgctgtggctgttcggacatgcgaccaccggcaagaccaacatcgcggaggctattgcccatgctgtgccgttctatggatgcgttaactggaccaacgagaactttccgttcaacgactgcgtcgaaaaaatgattatctggtgggaggagggcaaaatgaccgccaaagtggtggaaacagccaaggcgattctgggaggatctcgggtgagagtggaccaaaaatgcaaagcttcggttccgatcgaaccgacgccggtcattattaccagtaacaccaacatgtgttatgtcatcgacgggaacacgaccacgttcgagcataagcagccgttggaggacaggatgtttaagctcgaattgctgactcggttgcctgatgactttggtaaggtgaccaaacaggaggtgcgtcaattcttcaggtggtctcaggatcacctgacccctgtgatcccagaattcctagtgcggaaggcggagtctcgcaaaagacccgccccttccggggaaggctatataagcccgacaaagcggcccgcgctcgcagagcagcagcaggcgtcggagagcgcggacccggttcccaccagattggttggagcggttggtcaaaaagggagtgaatgctgcagctga

SEQ ID NO: 2924 - DNA, 1608 bp, Artificial Sequence
  Synthetic polynucleotide
atggctgaaggaggtggcggcccagtgggcgatgcaggccagggtgccgatggagtgggcaattcctccggaaattggcattgcgattcccaatggctggaaaacggagtcgtcactcgaaccacccgaacctgggtcttgcccagctacaacaaccacctgtacaaacgaatccaaggacccagcggaggcgacaacaacaacaaattctttggattcagcaccccctggggatactttgactacaatcgattccactgccacttttccccgcgagactggcaacgactcatcaacaacaactggggcatccgtcccaaagcgatgcgctttagactctttaacatccaggttaaagaggtcacggtccaagacttcaacaccaccatcggcaacaacctcaccagtacggtccaggtctttgcggacaaggactaccaactgccgtacgtcctcggatcggctaccgaaggcaccttcccgccgttcccagcggatatctacacgatcccgcagtacgggtactgcacgctaaactacaacaacgaggcggtggatcgttcggccttctactgtctggactactttccctcagacatgctgcggacaggaaataactttgagtttacttacaccttcgaggacgttcctttccatagcatgtttgcccacaaccagacgctagaccggctgatgaatcccctcgtggatcagtacctctgggctttcagctccgtcagccaagcaggctcatctggacgagctcttcattactcgcgggcgactaaaaccaacatggcggctcaatataggaactggttacctgggcctttcttccgtgatcagcaaatctttacgggcgctagcaacatcactaaaaataacgtctttagcgtttgggaaaaaggcaagcaatgggaactcgacaatcggaccaacctaatgcagcccggtcctgcggcagcgaccacctttagcggagaacctgaccgtcaagccatgcaaaacacgctggcttttagcaggaccgtctacgatcaaacgaccgccacgaccgatcgtaaccagatactcatcaccaacgaagacgaaatcagacccaccaactcggtcggtatcgacgcgtggggagcagttcccaccaacaaccagtcgatcgtgacccccggcactcgcgcggccgtcaacaatcaaggggcgcttcccgggatggtgtggcaaaacagagacatttaccctacagggacccatttggccaaaattcccgacactgacaatcacttccatccgtccccgcttattgggcggtttggctgcaagcatccccctccccagattttcattaaaaacacacccgtccctgccaacccttcggaaacgttccagacggccaaagtggcctccttcatcaaccagtactcgaccggacagtgcaccgtcgaaatcttttgggaactcaagaaggaaacctccaagcgctggaaccccgaaatccagttcacctccaactttggcaacgcggccgacatccagtttgccgtctccgacacgggatcctattccgaacctcgtcccatcggtacccgttaccttaccaaacctctgtaa

SEQ ID NO: 2925 - DNA, 2232 bp, Artificial Sequence
  Synthetic polynucleotide
atgtctctcatttctgatgcgattccagattggttggagcggttggtcaaaaagggagtgaatgctgcagctgatttctaccatttggaaagcggtcctcctcgtcctaaggcaaatcagcaaactcaagaatctcttgaaaaggacgattcgagaggtctcgtgttcccaggctacaattatctaggccctttcaacggtctagataaaggagaacccgtcaacgaggcagacgctgccgccttagaacacgacaaggcttacgacctcgaaatcaaggacgggcacaacccgtactttgagtacaacgaggccgacagacgtttccaggaacgtctcaaagacgatacctcctttggaggcaatttaggtaaagccatcttccaggccaaaaagagggttctcgaaccctttggtctggtggaagactcaaagacggctccgaccggagacaagcggaaaggcgaagacgaacctcgtttgcccgacacttcttcacagactcccaagaaaaacaagaagcctcgcaaggaaagaccttccggcggggcagaagatccgggcgaaggcacctcttccaacgctggagcagcagcacccgcctctagtgtgggatcatctatcatggctgaaggaggtggcggcccagtgggcgatgcaggccagggtgccgatggagtgggcaattcctccggaaattggcattgcgattcccaatggctggaaaacggagtcgtcactcgaaccacccgaacctgggtcttgcccagctacaacaaccacctgtacaaacgaatccaaggacccagcggaggcgacaacaacaacaaattctttggattcagcaccccctggggatactttgactacaatcgattccactgccacttttccccgcgagactggcaacgactcatcaacaacaactggggcatccgtcccaaagcgatgcgctttagactctttaacatccaggttaaagaggtcacggtccaagacttcaacaccaccatcggcaacaacctcaccagtacggtccaggtctttgcggacaaggactaccaactgccgtacgtcctcggatcggctaccgaaggcaccttcccgccgttcccagcggatatctacacgatcccgcagtacgggtactgcacgctaaactacaacaacgaggcggtggatcgttcggccttctactgtctggactactttccctcagacatgctgcggacaggaaataactttgagtttacttacaccttcgaggacgttcctttccatagcatgtttgcccacaaccagacgctagaccggctgatgaatcccctcgtggatcagtacctctgggctttcagctccgtcagccaagcaggctcatctggacgagctcttcattactcgcgggcgactaaaaccaacatggcggctcaatataggaactggttacctgggcctttcttccgtgatcagcaaatctttacgggcgctagcaacatcactaaaaataacgtctttagcgtttgggaaaaaggcaagcaatgggaactcgacaatcggaccaacctaatgcagcccggtcctgcggcagcgaccacctttagcggagaacctgaccgtcaagccatgcaaaacacgctggcttttagcaggaccgtctacgatcaaacgaccgccacgaccgatcgtaaccagatactcatcaccaacgaagacgaaatcagacccaccaactcggtcggtatcgacgcgtggggagcagttcccaccaacaaccagtcgatcgtgacccccggcactcgcgcggccgtcaacaatcaaggggcgcttcccgggatggtgtggcaaaacagagacatttaccctacagggacccatttggccaaaattcccgacactgacaatcacttccatccgtccccgcttattgggcggtttggctgcaagcatccccctccccagattttcattaaaaacacacccgtccctgccaacccttcggaaacgttccagacggccaaagtggcctccttcatcaaccagtactcgaccggacagtgcaccgtcgaaatcttttgggaactcaagaaggaaacctccaagcgctggaaccccgaaatccagttcacctccaactttggcaacgcggccgacatccagtttgccgtctccgacacgggatcctattccgaacctcgtcccatcggtacccgttaccttaccaaacctctgtaa

SEQ ID NO: 2926 - protein, 535 aa, Artificial Sequence
  Synthetic polypeptide
MAEGGGGPVGDAGQGADGVGNSSGNWHCDSQWLENGVVTRTTRTWVLPSYNNHLYKRIQGPSGGDNNNKFFGFSTPWGYFDYNRFHCHFSPRDWQRLINNNWGIRPKAMRFRLFNIQVKEVTVQDFNTTIGNNLTSTVQVFADKDYQLPYVLGSATEGTFPPFPADIYTIPQYGYCTLNYNNEAVDRSAFYCLDYFPSDMLRTGNNFEFTYTFEDVPFHSMFAHNQTLDRLMNPLVDQYLWAFSSVSQAGSSGRALHYSRATKTNMAAQYRNWLPGPFFRDQQIFTGASNITKNNVFSVWEKGKQWELDNRTNLMQPGPAAATTFSGEPDRQAMQNTLAFSRTVYDQTTATTDRNQILITNEDEIRPTNSVGIDAWGAVPTNNQSIVTPGTRAAVNNQGALPGMVWQNRDIYPTGTHLAKIPDTDNHFHPSPLIGRFGCKHPPPQIFIKNTPVPANPSETFQTAKVASFINQYSTGQCTVEIFWELKKETSKRWNPEIQFTSNFGNAADIQFAVSDTGSYSEPRPIGTRYLTKPL

SEQ ID NO: 2927 - protein, 440 aa, Artificial Sequence
  Synthetic polypeptide
MELVDWLVEKGITTEKEWLLENRESFRSFQASSNSARQIKTALQGAIQEMLLTKTAEDYLVGKDPVSDDDIRQNRIYKILELNHYDPAYVGSILVGWCQKKWGKRNTLWLFGHATTGKTNIAEAIAHAVPFYGCVNWTNENFPFNDCVEKMIIWWEEGKMTAKVVETAKAILGGSRVRVDQKCKASVPIEPTPVIITSNTNMCYVIDGNTTTFEHKQPLEDRMFKLELLTRLPDDFGKVTKQEVRQFFRWSQDHLTPVIPEFLVRKAESRKRPAPSGEGYISPTKRPALAEQQQASESADPVPTRYRIKCSKHCGMDKMLFPCQICESMNRDINICAIHKTTDCKECFPDYGDKDDVELPPCTEHNVSRCYQCHSGELYRVTSDSDEKPAPESDEGTEPSYAPCTIHHLMGKSHGLVTCAACRLKNSTLHDDLDDGDLEQ

SEQ ID NO: 2928 - protein, 319 aa, Artificial Sequence
  Synthetic polypeptide
MELVDWLVEKGITTEKEWLLENRESFRSFQASSNSARQIKTALQGAIQEMLLTKTAEDYLVGKDPVSDDDIRQNRIYKILELNHYDPAYVGSILVGWCQKKWGKRNTLWLFGHATTGKTNIAEAIAHAVPFYGCVNWTNENFPFNDCVEKMIIWWEEGKMTAKVVETAKAILGGSRVRVDQKCKASVPIEPTPVIITSNTNMCYVIDGNTTTFEHKQPLEDRMFKLELLTRLPDDFGKVTKQEVRQFFRWSQDHLTPVIPEFLVRKAESRKRPAPSGEGYISPTKRPALAEQQQASESADPVPTRLVGAVGQKGSECCS

SEQ ID NO: 2929 - protein, 662 aa, Artificial Sequence
  Synthetic polypeptide
MRSYYEVIVQLPNDVESQVPGISDSFVNWITSREWTLPEDADWDLDQVDQVQLTLGDKIQREIRTHWGTMAKEPDFHYFIQLEQGEVFFHLHVLLETCSVKPMVLGRYIRHIQQKIVSKVYCATSLRWKDGCVVTKTKNFGGANKVRAESYIPAYLIPKQQPEVQWAWTNVPEYIKACLHRELRASLARLHFEEAGVSQSKENLARTADGAPVMPTRVSKRYMELVDWLVEKGITTEKEWLLENRESFRSFQASSNSARQIKTALQGAIQEMLLTKTAEDYLVGKDPVSDDDIRQNRIYKILELNHYDPAYVGSILVGWCQKKWGKRNTLWLFGHATTGKTNIAEAIAHAVPFYGCVNWTNENFPFNDCVEKMIIWWEEGKMTAKVVETAKAILGGSRVRVDQKCKASVPIEPTPVIITSNTNMCYVIDGNTTTFEHKQPLEDRMFKLELLTRLPDDFGKVTKQEVRQFFRWSQDHLTPVIPEFLVRKAESRKRPAPSGEGYISPTKRPALAEQQQASESADPVPTRYRIKCSKHCGMDKMLFPCQICESMNRDINICAIHKTTDCKECFPDYGDKDDVELPPCTEHNVSRCYQCHSGELYRVTSDSDEKPAPESDEGTEPSYAPCTIHHLMGKSHGLVTCAACRLKNSTLHDDLDDGDLEQ

SEQ ID NO: 2930 - protein, 541 aa, Artificial Sequence
  Synthetic polypeptide
MRSYYEVIVQLPNDVESQVPGISDSFVNWITSREWTLPEDADWDLDQVDQVQLTLGDKIQREIRTHWGTMAKEPDFHYFIQLEQGEVFFHLHVLLETCSVKPMVLGRYIRHIQQKIVSKVYCATSLRWKDGCVVTKTKNFGGANKVRAESYIPAYLIPKQQPEVQWAWTNVPEYIKACLHRELRASLARLHFEEAGVSQSKENLARTADGAPVMPTRVSKRYMELVDWLVEKGITTEKEWLLENRESFRSFQASSNSARQIKTALQGAIQEMLLTKTAEDYLVGKDPVSDDDIRQNRIYKILELNHYDPAYVGSILVGWCQKKWGKRNTLWLFGHATTGKTNIAEAIAHAVPFYGCVNWTNENFPFNDCVEKMIIWWEEGKMTAKVVETAKAILGGSRVRVDQKCKASVPIEPTPVIITSNTNMCYVIDGNTTTFEHKQPLEDRMFKLELLTRLPDDFGKVTKQEVRQFFRWSQDHLTPVIPEFLVRKAESRKRPAPSGEGYISPTKRPALAEQQQASESADPVPTRLVGAVGQKGSECCS

SEQ ID NO: 2931 - protein, 743 aa, Artificial Sequence
  Synthetic polypeptide
MSLISDAIPDWLERLVKKGVNAAADFYHLESGPPRPKANQQTQESLEKDDSRGLVFPGYNYLGPFNGLDKGEPVNEADAAALEHDKAYDLEIKDGHNPYFEYNEADRRFQERLKDDTSFGGNLGKAIFQAKKRVLEPFGLVEDSKTAPTGDKRKGEDEPRLPDTSSQTPKKNKKPRKERPSGGAEDPGEGTSSNAGAAAPASSVGSSIMAEGGGGPVGDAGQGADGVGNSSGNWHCDSQWLENGVVTRTTRTWVLPSYNNHLYKRIQGPSGGDNNNKFFGFSTPWGYFDYNRFHCHFSPRDWQRLINNNWGIRPKAMRFRLFNIQVKEVTVQDFNTTIGNNLTSTVQVFADKDYQLPYVLGSATEGTFPPFPADIYTIPQYGYCTLNYNNEAVDRSAFYCLDYFPSDMLRTGNNFEFTYTFEDVPFHSMFAHNQTLDRLMNPLVDQYLWAFSSVSQAGSSGRALHYSRATKTNMAAQYRNWLPGPFFRDQQIFTGASNITKNNVFSVWEKGKQWELDNRTNLMQPGPAAATTFSGEPDRQAMQNTLAFSRTVYDQTTATTDRNQILITNEDEIRPTNSVGIDAWGAVPTNNQSIVTPGTRAAVNNQGALPGMVWQNRDIYPTGTHLAKIPDTDNHFHPSPLIGRFGCKHPPPQIFIKNTPVPANPSETFQTAKVASFINQYSTGQCTVEIFWELKKETSKRWNPEIQFTSNFGNAADIQFAVSDTGSYSEPRPIGTRYLTKPL

SEQ ID NO: 2932 - protein, 598 aa, Artificial Sequence
  Synthetic polypeptide
TAPTGDKRKGEDEPRLPDTSSQTPKKNKKPRKERPSGGAEDPGEGTSSNAGAAAPASSVGSSIMAEGGGGPVGDAGQGADGVGNSSGNWHCDSQWLENGVVTRTTRTWVLPSYNNHLYKRIQGPSGGDNNNKFFGFSTPWGYFDYNRFHCHFSPRDWQRLINNNWGIRPKAMRFRLFNIQVKEVTVQDFNTTIGNNLTSTVQVFADKDYQLPYVLGSATEGTFPPFPADIYTIPQYGYCTLNYNNEAVDRSAFYCLDYFPSDMLRTGNNFEFTYTFEDVPFHSMFAHNQTLDRLMNPLVDQYLWAFSSVSQAGSSGRALHYSRATKTNMAAQYRNWLPGPFFRDQQIFTGASNITKNNVFSVWEKGKQWELDNRTNLMQPGPAAATTFSGEPDRQAMQNTLAFSRTVYDQTTATTDRNQILITNEDEIRPTNSVGIDAWGAVPTNNQSIVTPGTRAAVNNQGALPGMVWQNRDIYPTGTHLAKIPDTDNHFHPSPLIGRFGCKHPPPQIFIKNTPVPANPSETFQTAKVASFINQYSTGQCTVEIFWELKKETSKRWNPEIQFTSNFGNAADIQFAVSDTGSYSEPRPIGTRYLTKPL

SEQ ID NO: 2933 - DNA, 4694 bp, Artificial Sequence
  Synthetic polynucleotide
tggccagtttccaagacaggctcgctcgctcactcgggccggggccccaaaggggcccctagcgaccgcttcgcggtcgcggcccgagtgagcgagcgagcctgtcttggaaactggccagcactccggtgaggtaatgccgtcacgtggtcgggaatgggaacgggaaatctcgcgagaacgtaaacaaatataagacggcgccacacggcgctgcgtcatacgcgcgcgcgcaccggcgagatgaggtcgtactacgaggtcatcgttcagctgcccaacgacgtcgagagtcaggtacctggaatctccgattcgttcgtcaactggattacgtcgcgagaatggacgttgcctgaggacgccgattgggatttggaccaggtcgatcaagttcaactgacgctcggcgacaaaatccaacgggagattcgaactcattgggggacgatggccaaagaaccggactttcactattttatccaactggaacaaggtgaggtgttctttcatttacacgtcctgctggaaacgtgttccgtaaagccgatggtactcggaagatatatccgacatattcaacaaaaaattgtgagtaaagtctactgcgccacgagcctacgatggaaggatggatgcgtggtgaccaagaccaaaaatttcgggggcgcgaacaaggtccgggccgagtcgtatattcccgcctacctgatcccgaaacagcaaccggaagtgcagtgggcgtggactaacgtgcccgagtatataaaagcgtgcttgcaccgagaactgcgtgccagtctcgcgcgacttcacttcgaggaggcgggcgtctcgcaatccaaggaaaatctcgcgagaactgcagacggcgctcccgtgatgccgacccgcgtcagcaaacgctacatggagctcgtggattggctcgtggagaaggggatcaccaccgagaaggaatggctgctggaaaacagagaaagctttcggagctttcaggcctcgagcaactcggcgcgtcagatcaagacggccctgcaaggcgccattcaggagatgcttctgaccaagacggcggaggactacctcgtcggaaaggatcccgtctcggacgacgacatccgtcagaaccgcatctacaagattctggaactgaaccactacgacccagcgtacgtggggagtattttggtcgggtggtgccagaagaaatggggcaagcgaaacacgctgtggctgttcggacatgcgaccaccggcaagaccaacatcgcggaggctattgcccatgctgtgccgttctatggatgcgttaactggaccaacgagaactttccgttcaacgactgcgtcgaaaaaatgattatctggtgggaggagggcaaaatgaccgccaaagtggtggaaacagccaaggcgattctgggaggatctcgggtgagagtggaccaaaaatgcaaagcttcggttccgatcgaaccgacgccggtcattattaccagtaacaccaacatgtgttatgtcatcgacgggaacacgaccacgttcgagcataagcagccgttggaggacaggatgtttaagctcgaattgctgactcggttgcctgatgactttggtaaggtgaccaaacaggaggtgcgtcaattcttcaggtggtctcaggatcacctgacccctgtgatcccagaattcctagtgcggaaggcggagtctcgcaaaagacccgccccttccggggaaggctatataagcccgacaaagcggcccgcgctcgcagagcagcagcaggcgtcggagagcgcggacccggttcccaccaggtatcgtatcaaatgctcgaaacattgcggtatggataaaatgttgtttccttgccaaatttgtgaatcgatgaacagagatattaatatttgtgctattcataaaacgaccgactgtaaagagtgtttccccgactacggggataaagatgatgtagaactacccccctgtacagaacacaacgtgtctcgttgttatcaatgtcattcgggcgaattgtatcgcgtgacttcggactctgacgagaaacctgcccccgagagtgatgaaggcaccgagccatcctatgctccctgcacgattcaccacctgatgggcaagagtcacgggttagtcacttgcgcggcgtgtcggttgaaaaatagtacgttgcatgatgacttggatgacggtgatctcgaacaataaatgattgaaatgtagccatgtctctcatttctgatgcgattccagattggttggagcggttggtcaaaaagggagtgaatgctgcagctgatttctaccatttggaaagcggtcctcctcgtcctaaggcaaatcagcaaactcaagaatctcttgaaaaggacgattcgagaggtctcgtgttcccaggctacaattatctaggccctttcaacggtctagataaaggagaacccgtcaacgaggcagacgctgccgccttagaacacgacaaggcttacgacctcgaaatcaaggacgggcacaacccgtactttgagtacaacgaggccgacagacgtttccaggaacgtctcaaagacgatacctcctttggaggcaatttaggtaaagccatcttccaggccaaaaagagggttctcgaaccctttggtctggtggaagactcaaagacggctccgaccggagacaagcggaaaggcgaagacgaacctcgtttgcccgacacttcttcacagactcccaagaaaaacaagaagcctcgcaaggaaagaccttccggcggggcagaagatccgggcgaaggcacctcttccaacgctggagcagcagcacccgcctctagtgtgggatcatctatcatggctgaaggaggtggcggcccagtgggcgatgcaggccagggtgccgatggagtgggcaattcctccggaaattggcattgcgattcccaatggctggaaaacggagtcgtcactcgaaccacccgaacctgggtcttgcccagctacaacaaccacctgtacaaacgaatccaaggacccagcggaggcgacaacaacaacaaattctttggattcagcaccccctggggatactttgactacaatcgattccactgccacttttccccgcgagactggcaacgactcatcaacaacaactggggcatccgtcccaaagcgatgcgctttagactctttaacatccaggttaaagaggtcacggtccaagacttcaacaccaccatcggcaacaacctcaccagtacggtccaggtctttgcggacaaggactaccaactgccgtacgtcctcggatcggctaccgaaggcaccttcccgccgttcccagcggatatctacacgatcccgcagtacgggtactgcacgctaaactacaacaacgaggcggtggatcgttcggccttctactgtctggactactttccctcagacatgctgcggacaggaaataactttgagtttacttacaccttcgaggacgttcctttccatagcatgtttgcccacaaccagacgctagaccggctgatgaatcccctcgtggatcagtacctctgggctttcagctccgtcagccaagcaggctcatctggacgagctcttcattactcgcgggcgactaaaaccaacatggcggctcaatataggaactggttacctgggcctttcttccgtgatcagcaaatctttacgggcgctagcaacatcactaaaaataacgtctttagcgtttgggaaaaaggcaagcaatgggaactcgacaatcggaccaacctaatgcagcccggtcctgcggcagcgaccacctttagcggagaacctgaccgtcaagccatgcaaaacacgctggcttttagcaggaccgtctacgatcaaacgaccgccacgaccgatcgtaaccagatactcatcaccaacgaagacgaaatcagacccaccaactcggtcggtatcgacgcgtggggagcagttcccaccaacaaccagtcgatcgtgacccccggcactcgcgcggccgtcaacaatcaaggggcgcttcccgggatggtgtggcaaaacagagacatttaccctacagggacccatttggccaaaattcccgacactgacaatcacttccatccgtccccgcttattgggcggtttggctgcaagcatccccctccccagattttcattaaaaacacacccgtccctgccaacccttcggaaacgttccagacggccaaagtggcctccttcatcaaccagtactcgaccggacagtgcaccgtcgaaatcttttgggaactcaagaaggaaacctccaagcgctggaaccccgaaatccagttcacctccaactttggcaacgcggccgacatccagtttgccgtctccgacacgggatcctattccgaacctcgtcccatcggtacccgttaccttaccaaacctctgtaaattaaacccttcaataaaccgtttatgcgtaactgtatttccgtctcctgtcgttattcagtcacatgatgcggcattacctcaccggagtgctggccagtttccaagacaggctcgctcgctcactcgggccggggccccaaaggggcccctagcgaccgcttcgcggtcgcggcccgagtgagcgagcgagcctgtcttggaaactggcca

SEQ ID NO: 2934 - DNA, 2211 bp, Artificial Sequence
  Synthetic polynucleotide
atggctgctgatggttatcttccagattggctcgaggacactctctctgaaggaataagacagtggtggaagctcaaacctggcccaccaccaccaaagcccgcagagcggcataaggacgacagcaggggtcttgtgcttcctgggtacaagtacctcggacccttcaacggactcgacaagggagagccggtcaacgaggcagacgcagcggccctcgagcacgacaaggcctacgaccagcagctcaaggccggtgacaacccctacctcaagtacaaccacgccgacgcggagttccagcagcggcttcagggcgacacatcgtttgggggcaacctcggcagagcagtcttccaggccaaaaagagggttcttgaacctcttggtctggttgagcaagcgggtgagacggctcctggaaagaagagaccgttgattgaatccccccagcagcccgactcctccacgggtatcggcaaaaaaggcaagcagccggctaaaaagagactcaattttggtcagactggcgactcagagtcagtccccgacccacaacctctcggagaacctccagcaacccccgctgctgtgggacctactacaatggcttcaggtggtggcgcaccaatggcagacaataacgaaggcgccgacggagtgggtaatgcctcaggaaattggcattgcgattccacatggctgggcgacagagtcatcaccaccagcacccgcacctgggccttgcccacctacaataaccacctctacaagcaaatctccagtgcttcaacgggggccagcaacgacaaccactacttcggctacagcaccccctgggggtattttgacttcaacagattccactgccacttttcaccacgtgactggcagcgactcatcaacaacaattggggattccggcccaagagactcaacttcaaactcttcaacatccaagtcaaggaggtcacgacgaatgatggcgtcacaaccatcgctaataaccttaccagcacggttcaagtcttctcggactcagactatcagctcccgtacgtgctcgggtcggctcacgagggctgcctcccgccgttcccagcagacgtcttcatggtgccacagtatggatacctcaccctgaacaacgggagtcaggcagtaggacgctcttcattttactgcctggagtactttccttctcagatgctgcgtaccggaaacaactttaccttcagctacacttttgaggacgttcctttccacagcagctacgctcacagccagagtctggaccgtctcatgaatcctctcatcgaccagtacctgtattacctgaacagaactcagaatcagtccggaagtgcccaaaacaaggacttgctgtttagccgggggtctccagctggcatgtctgttcagcccaaaaactggctacctggaccctgttatcggcagcagcgcgtttctaaaacaaaaacagacaacaacaacagcaactttacctggactggtgcttcaaaatataaccttaatgggcgtgaatctataatcaaccctggcactgctatggcctcacacaaagacgacaaagacaagttctttcccatgagcggtgtcatgatttttggaaaggagagcgccggagcttcaaacactgcattggacaatgtcatgatcacagacgaagaggaaatcaaagccactaaccccgtggccaccgaaagatttgggactgtggcagtcaatctccagagcagcagcacagaccctgcgaccggagatgtgcatgttatgggagccttacctggaatggtgtggcaagacagagacgtatacctgcagggtcccatttgggccaaaattcctcacacagatggacactttcacccgtctcctcttatgggcggctttggactcaagaacccgcctcctcagatcctcatcaaaaacacgcctgttcctgcgaatcctccggcggagttttcagctacaaagtttgcttcattcatcacccaatactccacaggacaagtgagtgtggaaattgaatgggagctgcagaaagaaaacagcaagcgctggaatcccgaagtgcagtacacatccaattatgcaaaatctgccaacgttgattttactgtggacaacaatggactttatactgagcctcgccccattggcacccgttacctcacccgtcccctgtaa

SEQ ID NO: 2935 - protein, 736 aa, Artificial Sequence
  Synthetic polypeptide
MAADGYLPDWLEDTLSEGIRQWWKLKPGPPPPKPAERHKDDSRGLVLPGYKYLGPFNGLDKGEPVNEADAAALEHDKAYDQQLKAGDNPYLKYNHADAEFQQRLQGDTSFGGNLGRAVFQAKKRVLEPLGLVEQAGETAPGKKRPLIESPQQPDSSTGIGKKGKQPAKKRLNFGQTGDSESVPDPQPLGEPPATPAAVGPTTMASGGGAPMADNNEGADGVGNASGNWHCDSTWLGDRVITTSTRTWALPTYNNHLYKQISSASTGASNDNHYFGYSTPWGYFDFNRFHCHFSPRDWQRLINNNWGFRPKRLNFKLFNIQVKEVTTNDGVTTIANNLTSTVQVFSDSDYQLPYVLGSAHEGCLPPFPADVFMVPQYGYLTLNNGSQAVGRSSFYCLEYFPSQMLRTGNNFTFSYTFEDVPFHSSYAHSQSLDRLMNPLIDQYLYYLNRTQNQSGSAQNKDLLFSRGSPAGMSVQPKNWLPGPCYRQQRVSKTKTDNNNSNFTWTGASKYNLNGRESIINPGTAMASHKDDKDKFFPMSGVMIFGKESAGASNTALDNVMITDEEEIKATNPVATERFGTVAVNLQSSSTDPATGDVHVMGALPGMVWQDRDVYLQGPIWAKIPHTDGHFHPSPLMGGFGLKNPPPQILIKNTPVPANPPAEFSATKFASFITQYSTGQVSVEIEWELQKENSKRWNPEVQYTSNYAKSANVDFTVDNNGLYTEPRPIGTRYLTRPL

SEQ ID NO: 2936 - DNA, 2211 bp, Artificial Sequence
  Synthetic polynucleotide
atggcttccgatggttatcttccagattggctcgaggacaacctctctgagggcatccgcgagtggtgggacttgaaacctggagccccgaaacccaaagccaaccagcaaaagcaggacgacggccggggtctggtgcttcctggctacaagtacctcggacccttcaacggactcgacaagggggagcccgtcaacgcggcggatgcagcggccctcgagcacgacaaggcctacgaccagcagctcagagcgggtgacaatccgtacctgcggtataaccacgccgacgccgagtttcaggagcgtctgcaagaagatacgtcttttgggggcaacctcgggcgagcagtcttccaggccaagaagagggttctcgaaccttttggtctggttgaggaaggtgctaagacggctcctggaaagaaacgtccggtagagcagtcgccacaagagccagactcctcctcgggcattggcaagacaggccagcagcccgctaaaaagagactcaattttggtcagactggcgactcagagtcagtccccgacccacaacctctcggagaacctccagcaacccccgctgctgtgggacctactacaatggcttcaggcggtggcgcaccaatggcagacaataacgaaggcgccgacggagtgggtaatgcctcaggaaattggcattgcgattccacatggctgggcgacagagtcatcaccaccagcacccgaacatgggccttgcccacctataacaaccacctctacaagcaaatctccagtgcttcaacgggggccagcaacgacaaccactacttcggctacagcaccccctgggggtattttgatttcaacagattccactgccatttctcaccacgtgactggcagcgactcatcaacaacaattggggattccggcccaagagactcaacttcaaactcttcaacatccaagtcaaggaggtcacgacgaatgatggcgtcacaaccatcgctaataaccttaccagcacggttcaagtcttctcggactcggagtaccagcttccgtacgtcctcggctctgcgcaccagggctgcctccctccgttcccggcggacgtgttcatgattccgcagtacggctacctaacgctcaacaatggcagccaggcagtgggacggtcatccttttactgcctggaatatttcccatcgcagatgctgagaacgggcaataactttaccttcagctacaccttcgaggacgtgcctttccacagcagctacgcgcacagccagagcctggaccggctgatgaatcctctcatcgaccagtacctgtattacctgaacagaactcagaatcagtccggaagtgcccaaaacaaggacttgctgtttagccgggggtctccagctggcatgtctgttcagcccaaaaactggctacctggaccctgttaccggcagcagcgcgtttctaaaacaaaaacagacaacaacaacagcaactttacctggactggtgcttcaaaatataaccttaatgggcgtgaatctataatcaaccctggcactgctatggcctcacacaaagacgacaaagacaagttctttcccatgagcggtgtcatgatttttggaaaggagagcgccggagcttcaaacactgcattggacaatgtcatgatcacagacgaagaggaaatcaaagccactaaccccgtggccaccgaaagatttgggactgtggcagtcaatctccagagcagcagcacagaccctgcgaccggagatgtgcatgttatgggagccttacctggaatggtgtggcaagacagagacgtatacctgcagggtcccatttgggccaaaattcctcacacagatggacactttcacccgtctcctcttatgggcggctttggacttaagcacccgcctcctcagatcctcatcaaaaacacgcctgttcctgcgaatcctccggcagagttttcggctacaaagtttgcttcattcatcacccagtattctactggccaagtcagcgtggagattgaatgggagctgcagaaagaaaacagcaaacgctggaatcccgaagtgcagtatacatctaactatgcaaaatctgccaacgttgatttcactgtggacaacaatggactttatactgagcctcgtcccattggcacccgttacctcacccgtcccctgtaa

SEQ ID NO: 2937 - protein, 736 aa, Artificial Sequence
  Synthetic polypeptide
MASDGYLPDWLEDNLSEGIREWWDLKPGAPKPKANQQKQDDGRGLVLPGYKYLGPFNGLDKGEPVNAADAAALEHDKAYDQQLRAGDNPYLRYNHADAEFQERLQEDTSFGGNLGRAVFQAKKRVLEPFGLVEEGAKTAPGKKRPVEQSPQEPDSSSGIGKTGQQPAKKRLNFGQTGDSESVPDPQPLGEPPATPAAVGPTTMASGGGAPMADNNEGADGVGNASGNWHCDSTWLGDRVITTSTRTWALPTYNNHLYKQISSASTGASNDNHYFGYSTPWGYFDFNRFHCHFSPRDWQRLINNNWGFRPKRLNFKLFNIQVKEVTTNDGVTTIANNLTSTVQVFSDSEYQLPYVLGSAHQGCLPPFPADVFMIPQYGYLTLNNGSQAVGRSSFYCLEYFPSQMLRTGNNFTFSYTFEDVPFHSSYAHSQSLDRLMNPLIDQYLYYLNRTQNQSGSAQNKDLLFSRGSPAGMSVQPKNWLPGPCYRQQRVSKTKTDNNNSNFTWTGASKYNLNGRESIINPGTAMASHKDDKDKFFPMSGVMIFGKESAGASNTALDNVMITDEEEIKATNPVATERFGTVAVNLQSSSTDPATGDVHVMGALPGMVWQDRDVYLQGPIWAKIPHTDGHFHPSPLMGGFGLKHPPPQILIKNTPVPANPPAEFSATKFASFITQYSTGQVSVEIEWELQKENSKRWNPEVQYTSNYAKSANVDFTVDNNGLYTEPRPIGTRYLTRPL

SEQ ID NO: 2938 - DNA, 2211 bp, Artificial Sequence
  Synthetic polynucleotide
atggctgctgatggttatcttccagattggctcgaggacactctctctgaaggaataagacagtggtggaagctcaaacctggcccaccaccaccaaagcccgcagagcggcataaggacgacagcaggggtcttgtgcttcctgggtacaagtacctcggacccttcaacggactcgacaagggagagccggtcaacgaggcagacgcagcggccctcgagcacgacaaggcctacgaccagcagctcaaggccggtgacaacccctacctcaagtacaaccacgccgacgcggagttccagcagcggcttcagggcgacacatcgtttgggggcaacctcggcagagcagtcttccaggccaaaaagagggttcttgaacctcttggtctggttgagcaagcgggtgagacggctcctggaaagaagagaccgttgattgaatccccccagcagcccgactcctccacgggtatcggcaaaaaaggcaagcagccggctaaaaagagactcaattttggtcagactggcgactcagagtcagtccccgacccacaacctctcggagaacctccagcaacccccgctgctgtgggacctactacaatggcttcaggtggtggcgcaccaatggcagacaataacgaaggcgccgacggagtgggtaatgcctcaggaaattggcattgcgattccacatggctgggcgacagagtcatcaccaccagcacccgcacctgggccttgcccacctacaataaccacctctacaagcaaatctccagtgcttcaacgggggccagcaacgacaaccactacttcggctacagcaccccctgggggtattttgacttcaacagattccactgccacttttcaccacgtgactggcagcgactcatcaacaacaattggggattccggcccaagagactcaacttcaaactcttcaacatccaagtcaaggaggtcacgacgaatgatggcgtcacaaccatcgctaataaccttaccagcacggttcaagtcttctcggactcagactatcagctcccgtacgtgctcgggtcggctcacgagggctgcctcccgccgttcccagcagacgtcttcatggtgccacagtatggatacctcaccctgaacaacgggagtcaggcagtaggacgctcttcattttactgcctggagtactttccttctcagatgctgcgtaccggaaacaactttaccttcagctacacttttgaggacgttcctttccacagcagctacgctcacagccagagtctggaccgtctcatgaatcctctcatcgaccagtacctgtattacctgaacagaactcagaatcagtccggaagtgcccaaaacaaggacttgctgtttagccgggggtctccaactggcatgtctgttcagcccaaaaactggctacctggaccctgttatcggcagcagcgcgtttctaaaacaaaaacagacaacaacaacagcaactttacctggactggtgcttcaaaatataaccttaatgggcgtgaatctataatcaaccctggcactgctatggcctcacacaaagacgacaaagacaagttctttcccatgagcggtgtcatgatttttggaaaggagagcgccggagcttcaaacactgcattggacaatgtcatgatcacagacgaagaggaaatcaaagccactaaccccgtggccactgaaagatttgggactgtggcagtcaatctccagagcagcagcacagaccctgcgaccggagatgtgcatgccatgggagccttacctggaatggtgtggcaagacagagacgtatacctgcagggtcctatttgggccaaaattcctcacacggatggacactttcacccgtctcctctcatgggcggctttggactcaagaacccgcctcctcagatcctcatcaaaaacacgcctgttcctgcgaatcctccggcggagttttcagctacaaagtttgcttcattcatcacccagtattccacaggacaagtgagcgtggagattgaatgggagctgcagaaagaaaacagcaaacgctggaatcccgaagtgcagtatacatctaactatgcaaaatctgccaacgttgatttcactgtggacaacaatggactttatactgagcctcgccccattggcacccgttacctcacccgtcccctgtaa

SEQ ID NO: 2939 - protein, 736 aa, Artificial Sequence
  Synthetic polypeptide
MAADGYLPDWLEDTLSEGIRQWWKLKPGPPPPKPAERHKDDSRGLVLPGYKYLGPFNGLDKGEPVNEADAAALEHDKAYDQQLKAGDNPYLKYNHADAEFQQRLQGDTSFGGNLGRAVFQAKKRVLEPLGLVEQAGETAPGKKRPLIESPQQPDSSTGIGKKGKQPAKKRLNFGQTGDSESVPDPQPLGEPPATPAAVGPTTMASGGGAPMADNNEGADGVGNASGNWHCDSTWLGDRVITTSTRTWALPTYNNHLYKQISSASTGASNDNHYFGYSTPWGYFDFNRFHCHFSPRDWQRLINNNWGFRPKRLNFKLFNIQVKEVTTNDGVTTIANNLTSTVQVFSDSDYQLPYVLGSAHEGCLPPFPADVFMVPQYGYLTLNNGSQAVGRSSFYCLEYFPSQMLRTGNNFTFSYTFEDVPFHSSYAHSQSLDRLMNPLIDQYLYYLNRTQNQSGSAQNKDLLFSRGSPTGMSVQPKNWLPGPCYRQQRVSKTKTDNNNSNFTWTGASKYNLNGRESIINPGTAMASHKDDKDKFFPMSGVMIFGKESAGASNTALDNVMITDEEEIKATNPVATERFGTVAVNLQSSSTDPATGDVHAMGALPGMVWQDRDVYLQGPIWAKIPHTDGHFHPSPLMGGFGLKNPPPQILIKNTPVPANPPAEFSATKFASFITQYSTGQVSVEIEWELQKENSKRWNPEVQYTSNYAKSANVDFTVDNNGLYTEPRPIGTRYLTRPL

SEQ ID NO: 2940 - DNA, 2211 bp, Artificial Sequence
  Synthetic polynucleotide
atggctgccgatggttatcttccagattggctcgaggacaacctctctgagggcattcgcgagtggtgggcgctgaaacctggagccccgaagcccaaagccaaccagcaaaagcaggacgacggccggggtctggtgcttcctggctacaagtacctcggacccttcaacggactcgacaagggggagcccgtcaacgcggcggatgcagcggccctcgagcacgacaaggcctacgaccagcagctcaaagcgggtgacaatccgtacctgcggtataaccacgccgacgccgagtttcaggagcgtctgcaagaagatacgtcttttgggggcaacctcgggcgagcagtcttccaggccaagaagcgggttctcgaacctctcggtctggttgaggaaggcgctaagacggctcctggaaagaaacgtccggtagagcaatcgccacaagagccagactcctcctcgggcatcggcaagacaggccagcagcccgctaaaaagagactcaattttggtcagactggcgactcagagtcagtccccgacccacaacctctcggagaacctccagcaacccccgctgctgtgggacctactacaatggcttcaggcggtggcgcaccaatggcagacaataacgaaggcgccgacggagtgggtaatgcctcaggaaattggcattgcgattccacatggctgggcgacagagtcatcaccaccagcacccgaacatgggccttgcccacctataacaaccacctctacaagcaaatctccagtgcttcgacgggggccagcaacgacaaccactacttcggctacagcaccccctgggggtattttgactttaacagattccactgccacttttcaccacgtgactggcagcgactcatcaacaacaactggggattccggcccaagagactcagcttcaagctcttcaacatccaggtcaaggaggtcacgacgaatgatggcgtcacaaccatcgctaataaccttaccagcacggttcaagtcttctcggactcggagtaccagcttccgtacgtcctcggctctgcgcaccagggctgcctccctccgttcccggcggacgtgttcatgattccgcaatacggctacctgacgctcaacaatggcagccaagccgtgggacgttcatccttttactgcctggaatatttcccttctcagatgctgagaacgggcaacaactttaccttcagctacacctttgaggaagtgcctttccacagcagctacgcgcacagccagagcctggaccggctgatgaatcctctcatcgatcaatacctgtattacctgaacagaactcaaaatcagtccggaagtgcccaaaacaaggacttgctgtttagccgtgggtctccagctggcatgtctgttcagcccaaaaactggctacctggaccctgttatcggcagcagcgcgtttctaaaacaaaaacagacaacaacaacagcaattttacctggactggtgcttcaaaatataacctcaatgggcgtgaatccatcatcaaccctggcactgctatggcctcacataaagacgacgaagacaagttctttcccatgagcggtgtcatgatttttggaaaagagagcgccggagcttcaaacactgcattggacaatgtcatgattacagacgaagaggaaattaaagccactaaccctgtggccaccgaaagatttgggaccgtggcagtcaatttccagagcagcagcacagaccctgcgaccggagatgtgcatgctatgggagcattacctggcatggtgtggcaagatagagacgtgtacctgcagggtcccatttgggccaaaattcctcacacagatggacactttcacccgtctcctcttatgggcggctttggactcaagaacccgcctcctcagatcctcatcaaaaacacgcctgttcctgcgaatcctccggcggagttttcagctacaaagtttgcttcattcatcacccaatactccacaggacaagtgagcgtggagattgaatgggagctgcagaaagaaaacagcaaacgctggaatcccgaagtgcagtatacatctaactatgcaaaatctgccaacattgatttcactgtggacaacaatggactttatactgagcctcgccccattggcacccgttacctcacccgtccccagtaa

SEQ ID NO: 2941 - protein, 736 aa, Artificial Sequence
  Synthetic polypeptide
MAADGYLPDWLEDNLSEGIREWWALKPGAPKPKANQQKQDDGRGLVLPGYKYLGPFNGLDKGEPVNAADAAALEHDKAYDQQLKAGDNPYLRYNHADAEFQERLQEDTSFGGNLGRAVFQAKKRVLEPLGLVEEGAKTAPGKKRPVEQSPQEPDSSSGIGKTGQQPAKKRLNFGQTGDSESVPDPQPLGEPPATPAAVGPTTMASGGGAPMADNNEGADGVGNASGNWHCDSTWLGDRVITTSTRTWALPTYNNHLYKQISSASTGASNDNHYFGYSTPWGYFDFNRFHCHFSPRDWQRLINNNWGFRPKRLSFKLFNIQVKEVTTNDGVTTIANNLTSTVQVFSDSEYQLPYVLGSAHQGCLPPFPADVFMIPQYGYLTLNNGSQAVGRSSFYCLEYFPSQMLRTGNNFTFSYTFEEVPFHSSYAHSQSLDRLMNPLIDQYLYYLNRTQNQSGSAQNKDLLFSRGSPAGMSVQPKNWLPGPCYRQQRVSKTKTDNNNSNFTWTGASKYNLNGRESIINPGTAMASHKDDEDKFFPMSGVMIFGKESAGASNTALDNVMITDEEEIKATNPVATERFGTVAVNFQSSSTDPATGDVHAMGALPGMVWQDRDVYLQGPIWAKIPHTDGHFHPSPLMGGFGLKNPPPQILIKNTPVPANPPAEFSATKFASFITQYSTGQVSVEIEWELQKENSKRWNPEVQYTSNYAKSANIDFTVDNNGLYTEPRPIGTRYLTRPQ

SEQ ID NO: 2942 - DNA, 2211 bp, Artificial Sequence
  Synthetic polynucleotide
atggctgccgatggttatcttccagattggctcgaggacaacctctctgagggcattcgcgagtggtgggacttgaaacctggagccccgaaacccaaagccaaccagcaaaagcaggacgacggccggggtctggtgcttcctggctacaagtacctcggacccttcaacggactcgacaagggggagcccgtcaacgcggcggatgcagcggccctcgagcacgacaaggcctacgaccagcagctcaaagcgggtgacaatccgtaccttcggtataaccacgccgacgccgagtttcaggagcgtctgcaagaagatacgtcttttgggggcaacctcgggcgagcagtcttccaggccaaaaagagggttctcgaacctctcggtctggttgaggaagcggctaagacggctcctggaaagaaacgtccggtagagcagtcgccacaagagccagactcctcctcgggcattggcaagacaggccagcagcccgctaaaaagagactcaattttggtcagactggcgactcagagtcagtccccgacccacaacctctcggagaacctcccgcagccccctcaggtgtgggatctcttacaatggcttcaggtggtggcgcaccaatggcagacaataacgaaggcgccgacggagtgggtaatgcctcaggaaattggcattgcgattccacatggctgggcgacagagtcatcaccaccagcacccgcacctgggccttgcccacctacaataaccacctctacaagcaaatctccagtgcttcaacgggggccagcaacgacaaccactacttcggctacagcaccccctgggggtattttgacttcaacagattccactgccacttttcaccacgtgactggcaaagactcatcaacaacaattggggattccggcccaagagactcaacttcaagctcttcaacatccaagtcaaggaggtcacgacgaatgatggcgtcacgaccatcgctaataaccttaccagcacggttcaagtcttctcggactcggagtaccagttgccgtacgtcctcggctctgcgcaccagggctgcctccctccgttcccggcggacgtgttcatgattccgcagtacggctacctaacgctcaacaatggcagccaggcagtgggacggtcatccttttactgcctggaatatttcccatcgcagatgctgagaacgggcaacaactttaccttcagctacacctttgaggaagtgcctttccacagcagctacgcgcacagccagagcctggaccggctgatgaatcctctcatcgaccagtacctgtattacctgaacagaactcaaaatcagtccggaagtgcccaaaacaaggacttgctgtttagccgtgggtctccagctggcatgtctgttcagcccaaaaactggctacctggaccctgttaccggcagcagtgcgtttctaaaacaaaaacagacaacaacaacagcaactttacctggactggtgcttcaaaatataaccttaatgggcgtgaatctataatcaaccctggcactgctatggcctcacacaaagacgacaaagacaagttctttcccatgagcggtgtcatgatttttggaaaggagagcgccggagcttcaaacactgcattggacaatgtcatgatcacagacgaagaggaaatcaaagccactaaccccgtggccaccgaaagatttgggactgtggcagtcaatctccagagcagcagcacagaccctgcgaccggagatgtgcatgttatgggagccttacctggaatggtgtggcaagacagagacgtatacctgcagggtcctatttgggccaaaattcctcacacagatggacactttcacccgtctcctcttatgggcggctttggactcaagaacccgcctcctcagatcctcatcaaaaacacgcctgttcctgcgaatcctccggcggagttttcagctacaaagtttgcttcattcatcacccaatactccacaggacaagtgagcgtggagattgaatgggagctgcagaaagaaaacagcaagcgctggaatcccgaagtgcagtacacatccaattatgcaaaatctgccaacgttgatttcactgtggacaacaatggactttatactgagcctcgccccattggcacccgttacctcacccgtcccctgtaa

SEQ ID NO: 2943 - protein, 736 aa, Artificial Sequence
  Synthetic polypeptide
MAADGYLPDWLEDNLSEGIREWWDLKPGAPKPKANQQKQDDGRGLVLPGYKYLGPFNGLDKGEPVNAADAAALEHDKAYDQQLKAGDNPYLRYNHADAEFQERLQEDTSFGGNLGRAVFQAKKRVLEPLGLVEEAAKTAPGKKRPVEQSPQEPDSSSGIGKTGQQPAKKRLNFGQTGDSESVPDPQPLGEPPAAPSGVGSLTMASGGGAPMADNNEGADGVGNASGNWHCDSTWLGDRVITTSTRTWALPTYNNHLYKQISSASTGASNDNHYFGYSTPWGYFDFNRFHCHFSPRDWQRLINNNWGFRPKRLNFKLFNIQVKEVTTNDGVTTIANNLTSTVQVFSDSEYQLPYVLGSAHQGCLPPFPADVFMIPQYGYLTLNNGSQAVGRSSFYCLEYFPSQMLRTGNNFTFSYTFEEVPFHSSYAHSQSLDRLMNPLIDQYLYYLNRTQNQSGSAQNKDLLFSRGSPAGMSVQPKNWLPGPCYRQQCVSKTKTDNNNSNFTWTGASKYNLNGRESIINPGTAMASHKDDKDKFFPMSGVMIFGKESAGASNTALDNVMITDEEEIKATNPVATERFGTVAVNLQSSSTDPATGDVHVMGALPGMVWQDRDVYLQGPIWAKIPHTDGHFHPSPLMGGFGLKNPPPQILIKNTPVPANPPAEFSATKFASFITQYSTGQVSVEIEWELQKENSKRWNPEVQYTSNYAKSANVDFTVDNNGLYTEPRPIGTRYLTRPL

SEQ ID NO: 2944 - DNA, 2211 bp, Artificial Sequence
  Synthetic polynucleotide
atggctgccgatggttatcttccagattggctcgaggacaacctctctgagggcattcgcgaatggtgggacttgaaacctggagccccgaaacccaaagtcaaccagcaaaagcaggacaacgctcggggtcttgtgcttccgggttacaaatacctcggacccttcaacggactcgacaagggggagcccgtcaacgcggcggacgcagcggccctcgagcacgacaaggcctacgaccagcagctcaaagcgggtgacaatccgtaccttcggtataaccacgccgacgccgagtttcaggagcgtctgcaagaagatacgtcttttgggggcaaccttggacgagcagtcttccaggccaagaagagggttctcgaaccttttggtctggttgaggaaggtgctaagacggctcctggaaagaaacgtccggtagagcagtcgccacaagagccagactcctcctcgggcattggcaagacaggccagcagcccgctaaaaagagactcaattttggtcagactggcgactcagagtcagtccccgacccacaacctctcggagaacctccagcaacccccgctgctgtgggacctactacaatggcttcaggcggtggcgcaccaatggcagacaataacgaaggcgccgacggagtgggtaatgcctcaggaaattggcattgcgattccacatggctgggcgacagagtcatcaccaccagcacccgcacctgggccttgcccacctacaataaccacctctacaagcaaatctccagtgcttcaacgggggccagcaacgacaaccactacttcggctacagcaccccctgggggtattttgacttcaacagattccactgccacttttcaccacgtgactggcaaagactcatcaacaacaattggggattccggcccaagagactcaacttcaagctcttcaacatccaagtcaaggaggtcacgacgaatgatggcgtcacgaccatcgctaataaccttaccagcacggttcaagtcttctcggactcggagtaccagttgccgtacgtcctcggctctgcgcaccagggctgcctccctccgttcccggcggacgtgttcatgattccgcaatacggctacctgacgctcaacaatggcagccaggcagtgggacggtcatccttttactgcctggaatatttcccatcgcagatgctgagaacgggcaataactttaccttcagctacacttttgaggacgttcctttccacagcagctacgctcacagccagagcctggaccggctgatgaatcctctcatcgaccagtacctgtattacctgaacagaactcagaatcagtccggaagtgcccaaaacaaggacttgctgtttagccgtgggtctccaactggcatgtctgttcagcccaaaaactggctacctggaccctgttatcggcagcagcgcgtttctaaaacaaaaacagacaacaacaacagcaactttacctggactggtgcttcaaaatataaccttaatgggcgtgaatctataatcaaccctggcactgctatggcctcacacaaagacgacgaagacaagttctttcccatgagcggtgtcatgatttttggaaaggagagcgccggagcttcaaacactgcattggacaatgtcatgatcacagacgaagaggaaatcaaagccactaaccccgtggccactgaaagatttgggactgtggcagtcaatctccagagcagcagcacagaccctgcgaccggagatgtgcatgccatgggagccttacctggaatggtgtggcaagacagagacgtatacctgcagggtcctatttgggccaaaattcctcacacggatggacactttcacccgtctcctctcatgggcggctttggacttaagcacccgcctcctcagatcctcatcaaaaacacgcctgttcctgcgaatcctccggcagagttttcggctacaaagtttgcttcattcatcacccagtattccacaggacaagtgagcgtggagattgaatgggagctgcagaaagaaaacagcaaacgctggaatcccgaagtgcagtatacatctaactatgcaaaatctgccaacgttgatttcactgtggacaacaatggactttatactgagcctcgccccattggcacccgttacctcacccgtcccctgtaa

SEQ ID NO: 2945 - protein, 736 aa, Artificial Sequence
  Synthetic polypeptide
MAADGYLPDWLEDNLSEGIREWWDLKPGAPKPKVNQQKQDNARGLVLPGYKYLGPFNGLDKGEPVNAADAAALEHDKAYDQQLKAGDNPYLRYNHADAEFQERLQEDTSFGGNLGRAVFQAKKRVLEPFGLVEEGAKTAPGKKRPVEQSPQEPDSSSGIGKTGQQPAKKRLNFGQTGDSESVPDPQPLGEPPATPAAVGPTTMASGGGAPMADNNEGADGVGNASGNWHCDSTWLGDRVITTSTRTWALPTYNNHLYKQISSASTGASNDNHYFGYSTPWGYFDFNRFHCHFSPRDWQRLINNNWGFRPKRLNFKLFNIQVKEVTTNDGVTTIANNLTSTVQVFSDSEYQLPYVLGSAHQGCLPPFPADVFMIPQYGYLTLNNGSQAVGRSSFYCLEYFPSQMLRTGNNFTFSYTFEDVPFHSSYAHSQSLDRLMNPLIDQYLYYLNRTQNQSGSAQNKDLLFSRGSPTGMSVQPKNWLPGPCYRQQRVSKTKTDNNNSNFTWTGASKYNLNGRESIINPGTAMASHKDDEDKFFPMSGVMIFGKESAGASNTALDNVMITDEEEIKATNPVATERFGTVAVNLQSSSTDPATGDVHAMGALPGMVWQDRDVYLQGPIWAKIPHTDGHFHPSPLMGGFGLKHPPPQILIKNTPVPANPPAEFSATKFASFITQYSTGQVSVEIEWELQKENSKRWNPEVQYTSNYAKSANVDFTVDNNGLYTEPRPIGTRYLTRPL

SEQ ID NO: 2946 - DNA, 2208 bp, Artificial Sequence
  Synthetic polynucleotide
  modified_base (955)..(955): a, c, g, or t
  misc_feature (955)..(955): n is a, c, g, or t
  modified_base (971)..(972): a, c, g, or t
  misc_feature (971)..(972): n is a, c, g, or t
  modified_base (981)..(981): a, c, g, or t
  misc_feature (981)..(981): n is a, c, g, or t
  modified_base (986)..(986): a, c, g, or t
  misc_feature (986)..(986): n is a, c, g, or t
  modified_base (1235)..(1235): a, c, g, or t
  misc_feature (1235)..(1235): n is a, c, g, or t
  modified_base (1694)..(1696): a, c, g, or t
  misc_feature (1694)..(1696): n is a, c, g, or t
  modified_base (1698)..(1698): a, c, g, or t
  misc_feature (1698)..(1698): n is a, c, g, or t
  modified_base (1763)..(1765): a, c, g, or t
  misc_feature (1763)..(1765): n is a, c, g, or t
  modified_base (1778)..(1778): a, c, g, or t
  misc_feature (1778)..(1778): n is a, c, g, or t
  modified_base (2204)..(2204): a, c, g, or t
  misc_feature (2204)..(2204): n is a, c, g, or t
atggctgccgatggttatcttccagattggctcgaggacaacctctctgagggcattcgcgaatggtgggacttgaaacctggagccccgaaacccaaagtcaaccagcaaaagcaggacaacgctcggggtcttgtgcttccgggttacaaatacctcggacccttcaacggactcgacaagggggagcccgtcaacgcggcggacgcagcggccctcgagcacgacaaggcctacgaccagcagctcaaagcgggtgacaatccgtaccttcggtataaccacgccgacgccgagtttcaggagcgtctgcaagaagatacgtcttttgggggcaaccttggacgagcagtcttccaggccaagaagagggttctcgaaccttttggtctggttgaggaaggtgctaagacggctcctggaaagaaacgtccggtagagcagtcgccacaagagccagactcctcctcgggcattggcaagacaggccagcagcccgctaaaaagagactcaattttggtcagactggcgactcagagtcagtccccgacccacaacctctcggagaacctccagcaacccccgctgctgtgggacctactacaatggcttcaggcggtggcgcaccaatggcagacaataacgaaggcgccgacggagtgggtaatgcctcaggaaattggcattgcgattccacatggctgggcgacagagtcatcaccaccagcacccgaacatgggccttgcccacctataacaaccacctctacaagcaaatctccagtgcttcaacgggggccagcaacgacaaccactacttcggctacagcaccccctgggggtattttgatttcaacagattccactgccacttttcaccacgtgactggcagcgactcatcaataacaattggggattccggcccaagagactcaacttcaaactcttcaacntccaagtcaaggaggnnacgacgaangatgncgtcacaaccatcgctaataaccttaccagcacggttcaagtcttctcggactcggagtaccagcttccgtacgtcctcggctctgcgcaccagggctgcctccctccgttcccggcggacgtgttcatgattccgcaatacggctacctgacgctcaacaatggcagccaggcagtgggacggtcatccttttactgcctggaatatttcccatcgcagatgctgagaacgggcaataactttacctncagctacacttttgaggacgttcctttccacagcagctacgctcacagccagagcctggaccggctgatgaatcctctcatcgaccagtacctgtattacctgaacagaactcagaatcagtccggaagtgcccaaaacaaggacttgctgtttagccgtgggtctccaactggcatgtctgttcagcccaaaaactggctacctggaccctgttatcggcagcagcgcgtttctaaaacaaaaacagacaacaacaacagcaactttacctggactggtgcttcaaaatataaccttaatgggcgtgaatctataatcaaccctggcactgctatggcctcacacaaagacgacgaagacaagttctttcccatgagcggtgtcatgatttttggaaaggagagcgccggagcttcaaacactgcattggacaatgtcatgatcacagacgaagagannncnaagccactaaccccgtggccactgaaagatttgggactgtggcagtcaatctccaagcagcacannnaccctgcgaccgnagatgtgcatgccatgggagccttacctggaatggtgtggcaagacagagacgtatacctgcagggtcctatttgggccaaaattcctcacacggatggacactttcacccgtctcctctcatgggcggctttggacttaagcacccgcctcctcagatcctcatcaaaaacacgcctgttcctgcgaatcctccggcagagttttcggctacaaagtttgcttcattcatcacccagtattccacaggacaagtgagcgtggagattgaatgggagctgcagaaagaaaacagcaaacgctggaatcccgaagtgcagtatacatctaactatgcaaaatctgccaacgttgatttcactgtggacaacaatggactttatactgagcctcgccccattggcacccgttacctcacccgtccccngtaa

SEQ ID NO: 2947 - protein, 723 aa, Artificial Sequence
  Synthetic polypeptide
MAADGYLPDWLEDNLSEGIREWWDLKPGAPKPKVNQQKQDNARGLVLPGYKYLGPFNGLDKGEPVNAADAAALEHDKAYDQQLKAGDNPYLRYNHADAEFQERLQEDTSFGGNLGRAVFQAKKRVLEPFGLVEEGAKTAPGKKRPVEQSPQEPDSSSGIGKTGQQPAKKRLNFGQTGDSESVPDPQPLGEPPATPAAVGPTTMASGGGAPMADNNEGADGVGNASGNWHCDSTWLGDRVITTSTRTWALPTYNNHLYKQISSASTGASNDNHYFGYSTPWGYFDFNRFHCHFSPRDWQRLINNNWGFRPKRLNFKLFNQVKETTDVTTIANNLTSTVQVFSDSEYQLPYVLGSAHQGCLPPFPADVFMIPQYGYLTLNNGSQAVGRSSFYCLEYFPSQMLRTGNNFTSYTFEDVPFHSSYAHSQSLDRLMNPLIDQYLYYLNRTQNQSGSAQNKDLLFSRGSPTGMSVQPKNWLPGPCYRQQRVSKTKTDNNNSNFTWTGASKYNLNGRESIINPGTAMASHKDDEDKFFPMSGVMIFGKESAGASNTALDNVMITDEEATNPVATERFGTVAVNLQSSPATDVHAMGALPGMVWQDRDVYLQGPIWAKIPHTDGHFHPSPLMGGFGLKHPPPQILIKNTPVPANPPAEFSATKFASFITQYSTGQVSVEIEWELQKENSKRWNPEVQYTSNYAKSANVDFTVDNNGLYTEPRPIGTRYLTRP

SEQ ID NO: 2948 - DNA, 2208 bp, Artificial Sequence
  Synthetic polynucleotide
atggctgccgatggttatcttccagattggctcgaggacactctctctgaaggaataagacagtggtggaagctcaaacctggcccaccaccaccaaagcccgcagagcggcataaggacgacagcaggggtcttgtgcttcctgggtacaagtacctcggacccttcaacggactcgacaagggagagccggtcaacgaggcagacgccgcggccctcgagcacgacaaagcctatgaccggcagctcgacagcggagacaacccgtacctcaagtacaaccacgccgacgcggagtttcaggagcgccttaaagaagatacgtcttttgggggcaacctcggacgagcagtcttccaggcgaaaaagagggttcttgaacctctgggcctggttgaggaacctgttaagacggctccgggaaaaaagaggccggtagagcactctcctgtggagccagactcctcctcgggaaccggaaaggcgggtcagcagcctgcaagaaaaagattgaattttggtcagactggagacgcagactcagtacctgacccccagcctctcggacagccaccagcagccccctctggtctgggaactaatacgatggctacaggcagtggcgcaccaatggcagacaataacgagggcgccgacggagtgggtaattcctcgggaaattggcattgcgattccacatggatgggcgacagagtcatcaccaccagcacccgaacctgggccctgcccacctacaacaaccacctctacaaacaaatttccagccaatcaggagcctcgaacgacaatcactactttggctacagcaccccttgggggtattttgacttcaacagattccactgccacttttcaccacgtgactggcaaagactcatcaacaacaactggggattccgacccaagagactcaagttcaagctctttaacattcaagtcaaagaggtcacgcagaatgacggtacgacgacgattgccaataaccttaccagcacggttcaggtgtttactgactcggagtaccagctcccgtacgtcctcggctcggcgcatcaaggatgcctcccgccgttcccagcagacgtcttcatggtgccacagtatggatacctcaccctgaacaacgggagtcaggcagtaggacgctcttcattttactgcctggagtactttccttctcagatgctgcgtaccggtaacaactttaccttcagctacacttttgaggacgttcctttccacagcagctacgctcacagccagagtctggaccgtctcatgaatcctctcatcgaccagtacctgtattacttgagcagaacagacgctccaagtggaaccaccacgcagtcaaggcttcagttttctcaggccggagcgagtgacattcgggaccagtctaggaactggcttcctggaccctgttaccgccagcagcgagtatcaaagacatctgcggataacaacaacagtgaatactcgtggactggagctaccaagtaccacctcaatggcagagactctctggtgaatccgggcccggccatggcaagccacaaggacgatgaagaaaagttttttcctcagagcggggttctcatctttgggaagcaaggctcagagaaaacaagtgtggacattgaaaaggtcatgattacagacgaagaggaaatcaggacaaccaatcccgtggctacggagcagtatggttctgtatctaccaacctccagagaggcaacagacaagcagctaccgcagatgtcaacacacaaggcgttcttccaggcatggtctggcaggacagagatgtgtaccttcaggggcccatctgggcaaagattccacacacggacggacattttcacccctctcccctcatgggtggattcggacttaaacaccctcctccacagattctcatcaagaacaccccggtacctgcgaatccttcgaccaccttcagtgcggcaaagtttgcttccttcatcacacagtactccacgggacaggtcagcgtggagatcgagtgggagctgcagaaggaaaacagcaaacgctggaatcccgaagttcagtacacttccaactacaacaagtctgttaatgtggactttactgtggacactaatggcgtgtattcagagcctcgccccattggcaccagatacctgactcgtaatctgtaa

SEQ ID NO: 2949 - protein, 735 aa, Artificial Sequence
  Synthetic polypeptide
MAADGYLPDWLEDTLSEGIRQWWKLKPGPPPPKPAERHKDDSRGLVLPGYKYLGPFNGLDKGEPVNEADAAALEHDKAYDRQLDSGDNPYLKYNHADAEFQERLKEDTSFGGNLGRAVFQAKKRVLEPLGLVEEPVKTAPGKKRPVEHSPVEPDSSSGTGKAGQQPARKRLNFGQTGDADSVPDPQPLGQPPAAPSGLGTNTMATGSGAPMADNNEGADGVGNSSGNWHCDSTWMGDRVITTSTRTWALPTYNNHLYKQISSQSGASNDNHYFGYSTPWGYFDFNRFHCHFSPRDWQRLINNNWGFRPKRLKFKLFNIQVKEVTQNDGTTTIANNLTSTVQVFTDSEYQLPYVLGSAHQGCLPPFPADVFMVPQYGYLTLNNGSQAVGRSSFYCLEYFPSQMLRTGNNFTFSYTFEDVPFHSSYAHSQSLDRLMNPLIDQYLYYLSRTDAPSGTTTQSRLQFSQAGASDIRDQSRNWLPGPCYRQQRVSKTSADNNNSEYSWTGATKYHLNGRDSLVNPGPAMASHKDDEEKFFPQSGVLIFGKQGSEKTSVDIEKVMITDEEEIRTTNPVATEQYGSVSTNLQRGNRQAATADVNTQGVLPGMVWQDRDVYLQGPIWAKIPHTDGHFHPSPLMGGFGLKHPPPQILIKNTPVPANPSTTFSAAKFASFITQYSTGQVSVEIEWELQKENSKRWNPEVQYTSNYNKSVNVDFTVDTNGVYSEPRPIGTRYLTRNL

SEQ ID NO: 2950 - DNA, 2208 bp, Artificial Sequence
  Synthetic polynucleotide
atggctgccgatggttatcttccagattggctcgaggacactctctctgaaggaataagacagtggtggaagctcaaacctggcccaccaccaccaaagcccgcagagcggcataaggacgacagcaggggtcttgtgcttcctgggtacaagtacctcggacccttcaacggactcgacaagggagagccggtcaacgaggcagacgccgcggccctcgagcacgacaaagcctatgaccggcagctcgacagcggagacaacccgtacctcaagtacaaccacgccgacgcggagtttcaggagcgccttaaagaagatacgtcttttgggggcaacctcggacgagcagtcttccaggcgaaaaagagggttcttgaacctctgggcctggttgaggaacctgttaagacggctccgggaaaaaagaggccggtagagcactctcctgtggagccagactcctcctcgggaaccggaaaggcgggccagcagcctgcaagaaaaagattgaattttggtcagactggagacgcaaactcagtacctgacccccagcctctcggacagccaccagcagccccctctggtctgggaactaatacgatggctacaggcagtggcgcaccaatggcagacaataacgagggcgccgacggagtgggtaattcctcgggaaattggcattgcgattccacatggatgggcgacagagtcatcaccaccagcacccgaacctgggccctgcccacctacaacaaccacctctacaaacaaatttccagccaatcaggagcctcgaacgacaatcactactttggctacagcaccccttgggggtattttgacttcaacagattccactgccacttttcaccacgtgactggcaaagactcatcaacaacaactggggattccgacccaagagactcaagttcaagctctttaacattcaagtcaaagaggtcacgcagaatgacggtacgacgacgattgccaataaccttaccagcacggttcaggtgtttactgactcggagtaccagctcccgtacgtcctcggctcggcgcatcaaggatgcctcccgccgttcccagcagacgtcttcatggtgccacagtatggatacctcaccctgaacaacgggagtcgggcagtaggacgctcttcattttactgcctggagtactttccttctcagatgctgcgtaccggtaacaactttaccttcagctacacttttgaggacgttcctttccacagcagctacgctcacagccagagtctggaccgtctcatgaatcctctcatcgaccagtacctgtattacttgagcagaacagacactccaagtggaaccaccacgcagtcaaggcttcagttttctcaggccggagcgagtgacattcgggaccagtctaggaactggcttcctggaccctgttaccgccagcagcgagtatcaaagacatctgcggataacaacaacagtgaatactcgtggactggagctaccaagtaccacctcaatggcagagactctctggtgaatccgggcccggccatggcaagccacaaggacgatgaagaaaagttttttcctcagagcggggttctcatctttgggaagcaaggctcagagaaaacaagtgtggacattgaaaaggtcatgattacagacgaagaggaaatcaggacgaccaatcccgtggctacggagcagtatggttctgtatctaccaacctccagagaggcaacagacaagcagctaccgcagatgtcaacacacaaggcgttcttccaggcatggtctggcaggacagagatgtgtaccttcaggggcccatctgggcaaagattccacacacggacggacattttcacccctctcccctcatgggtggattcggacttaaacaccctcctccacagattctcatcaagaacaccccggtacctgcgaatccttcgaccaccttcagtgcggcaaagtttgcttccttcatcacacagtactccacgggacaggtcagcgtggagatcgagtgggagctgcagaaggaaaacagcaaacgctggaatcccgaagttcagtacacttccaactacaacaagtctgttaatgtggactttactgtggacactaatggcgtgtatacagagcctcgccccattggcaccagatacctgactcgtaatctgtaa

SEQ ID NO: 2951 - protein, 735 aa, Artificial Sequence
  Synthetic polypeptide
MAADGYLPDWLEDTLSEGIRQWWKLKPGPPPPKPAERHKDDSRGLVLPGYKYLGPFNGLDKGEPVNEADAAALEHDKAYDRQLDSGDNPYLKYNHADAEFQERLKEDTSFGGNLGRAVFQAKKRVLEPLGLVEEPVKTAPGKKRPVEHSPVEPDSSSGTGKAGQQPARKRLNFGQTGDANSVPDPQPLGQPPAAPSGLGTNTMATGSGAPMADNNEGADGVGNSSGNWHCDSTWMGDRVITTSTRTWALPTYNNHLYKQISSQSGASNDNHYFGYSTPWGYFDFNRFHCHFSPRDWQRLINNNWGFRPKRLKFKLFNIQVKEVTQNDGTTTIANNLTSTVQVFTDSEYQLPYVLGSAHQGCLPPFPADVFMVPQYGYLTLNNGSRAVGRSSFYCLEYFPSQMLRTGNNFTFSYTFEDVPFHSSYAHSQSLDRLMNPLIDQYLYYLSRTDTPSGTTTQSRLQFSQAGASDIRDQSRNWLPGPCYRQQRVSKTSADNNNSEYSWTGATKYHLNGRDSLVNPGPAMASHKDDEEKFFPQSGVLIFGKQGSEKTSVDIEKVMITDEEEIRTTNPVATEQYGSVSTNLQRGNRQAATADVNTQGVLPGMVWQDRDVYLQGPIWAKIPHTDGHFHPSPLMGGFGLKHPPPQILIKNTPVPANPSTTFSAAKFASFITQYSTGQVSVEIEWELQKENSKRWNPEVQYTSNYNKSVNVDFTVDTNGVYTEPRPIGTRYLTRNL

SEQ ID NO: 2952 - DNA, 2211 bp, Artificial Sequence
  Synthetic polynucleotide
atggctgccgatggttatcttccagattggctcgaggacactctctctgaaggaataagacagtggtggaagctcaaacctggcccaccaccaccaaagcccgcagagcggcataaggacgacagcaggggtcttgtgcttcctgggtacaagtacctcggacccttcaacggactcgacaagggagagccggtcaacgaggcagacgccgcggccctcgagcacgacaaggcctacgaccagcagctcaaagcgggtgacaatccgtacctgcggtataaccacgccgacgccgagtttcaggagcgtctgcaagaagatacgtcttttgggggcaacctcgggcgagcagtcttccaggccaagaagcgggttctcgaacctctcggtctggttgaggaaggcgctaagacggctcctggaaagaaacgtccggtagagcagtcgccacaagagccagactcctcctcgggcatcggcaagacaggccagcagcccgctaaaaagagactcaattttggtcagactggcgactcagagtcagtccccgacccacaacctctcggagaacctccagcaacccccgctgctgtgggacctactacaatggcttcaggcggtggcgcaccaatggcagacaataacgaaggcgccgacggagtgggtaatgcctcaggaaattggcattgcgattccacatggctgggcgacagagtcatcaccaccagcacccgaacatgggccttgcccacctataacaaccacctctacaagcaaatctccagtgcttcgacgggggccagcaacgacaaccactacttcggctacagcaccccctgggggtattttgactttaacagattccactgccacttttcaccacgtgactggcagcgactcatcaacaataactggggattccggcccaagagactcagcttcaagctcttcaacatccaggtcaaggaggtcacgacgaatgatggcgtcacaaccatcgctaataaccttaccagcacggttcaagtcttctcggactcggagtaccagcttccgtacgtcctcggctctgcgcaccagggctgcctccctccgttcccggcggacgtgttcatgattccgcaatacggctacctgacgctcaacaatggcagccaagccgtgggacgttcatccttttactgcctggaatatttcccttctcagatgctgagaacgggcaacaactttaccttcagctacacctttgaggaagtgcctttccacagcagctacgcgcacagccagagcctggaccggctgatgaatcctctcatcgatcaatacctgtattacctgaacagaactcaaaatcagtccggaagtgcccaaaacaaggacttgctgtttagccgtgggtctccagctggcatgtctgttcagcccaaaaactggctacctggaccctgttatcggcagcagcgcgtttctaaaacaaaaacagacaacaacaacagcaattttacctggactggtgcttcaaaatataacctcaatgggcgtgaatccatcatcaaccctggcactgctatggcctcacacaaagacgacgaagacaagttctttcccatgagcggtgtcatgatttttggaaaagagagcgccggagcttcaaacactgcattggacaatgtcatgattacggacgaagaggaaattaaagccactaaccctgtggccaccgaaagatttgggaccgtggcagtcaatttccagagcagcagcacagaccctgcgaccggagatgtgcatgctatgggagcattacctggcatggtgtggcaagatagagacgtgtacctgcagggtcccatttgggccaaaattcctcacacagatggacactttcacccgtctcctcttatgggcggctttggactcaagaacccgcctcctcagatcctcatcaaaaacacgcctgttcctgcgaatcctccggcggagttttcagctacaaagtttgcttcattcatcactcaatactccacaggacaagtgagcgtggaaattgaatgggagctgcagaaagaaaacagcaaacgctggaatcccgaagtgcagtatacatctaactatgcaaaatctgccaacgttgatttcactgtggacaacaatggactttatactgagcctcgccccattggcacccgttacctcacccgtcccctgtaa

SEQ ID NO: 2953 - protein, 736 aa, Artificial Sequence
  Synthetic polypeptide
MAADGYLPDWLEDTLSEGIRQWWKLKPGPPPPKPAERHKDDSRGLVLPGYKYLGPFNGLDKGEPVNEADAAALEHDKAYDQQLKAGDNPYLRYNHADAEFQERLQEDTSFGGNLGRAVFQAKKRVLEPLGLVEEGAKTAPGKKRPVEQSPQEPDSSSGIGKTGQQPAKKRLNFGQTGDSESVPDPQPLGEPPATPAAVGPTTMASGGGAPMADNNEGADGVGNASGNWHCDSTWLGDRVITTSTRTWALPTYNNHLYKQISSASTGASNDNHYFGYSTPWGYFDFNRFHCHFSPRDWQRLINNNWGFRPKRLSFKLFNIQVKEVTTNDGVTTIANNLTSTVQVFSDSEYQLPYVLGSAHQGCLPPFPADVFMIPQYGYLTLNNGSQAVGRSSFYCLEYFPSQMLRTGNNFTFSYTFEEVPFHSSYAHSQSLDRLMNPLIDQYLYYLNRTQNQSGSAQNKDLLFSRGSPAGMSVQPKNWLPGPCYRQQRVSKTKTDNNNSNFTWTGASKYNLNGRESIINPGTAMASHKDDEDKFFPMSGVMIFGKESAGASNTALDNVMITDEEEIKATNPVATERFGTVAVNFQSSSTDPATGDVHAMGALPGMVWQDRDVYLQGPIWAKIPHTDGHFHPSPLMGGFGLKNPPPQILIKNTPVPANPPAEFSATKFASFITQYSTGQVSVEIEWELQKENSKRWNPEVQYTSNYAKSANVDFTVDNNGLYTEPRPIGTRYLTRPL

SEQ ID NO: 2954 - protein, 735 aa, Artificial Sequence
  Synthetic polypeptide
MAADGYLPDWLEDTLSEGIRQWWKLKPGPPPPKPAERHKDDSRGLVLPGYKYLGPFNGLDKGEPVNEADAAALEHDKAYDRQLDSGDNPYLKYNHADAEFQERLKEDTSFGGNLGRAVFQAKKRVLEPLGLVEEPVKTAPGKKRPVEHSPVEPDSSSGTGKAGQQPARKRLNFGQTGDADSVPDPQPLGQPPAAPSGLGTNTMATGSGAPMADNNEGADGVGNSSGNWHCDSTWMGDRVITTSTRTWALPTYNNHLYKQISSQSGASNDNHYFGYSTPWGYFDFNRFHCHFSPRDWQRLINNNWGFRPKRLKFKLFNIQVKEVTQNDGTTTIANNLTSTVQVFTDSEYQLPYVLGSAHQGCLPPFPADVFMVPQYGYLTLNNGSQAVGRSSFYCLEYFPSQMLRTGNNFTFSYTFEDVPFHSSYAHSQSLDRLMNPLIDQYLYYLSRTDTPSGTTTQSRLQFSQAGASDIRNQSRNWLPGPCYRQQRVSKTSADNNNSEYSWTGATKYHLNGRDSLVNPGPAMASHKDDEEKFFPQSGVLIFGKQGSEKTSVDIEKVMITDEEEIRTTNPVATEQYGSVSTNLQRGNRQAATADVNTQGVLPGMVWQDRDVYLQGPIWAKIPHTDGHFHPSPLMGGFGLKHPPPQILIKNTPVPANPSTTFSAAKFASFITQYSTGQVSVEIEWELQKENSKRWNPEVQYTSNYNKSVNVDFTVDTNGVYSEPRPIGTRYLTRNQ

SEQ ID NO: 2955 - DNA, 2208 bp, Artificial Sequence
  Synthetic polynucleotide
atggctgccgatggttatcttccagattggctcgaggacactctctctgaaggaataagacagtggtggaagctcaaacctggcccaccaccaccaaagcccgcagagcggcataaggacgacagcaggggtcttgtgcttcctgggtacaagtacctcggacccttcaacggactcgacaagggagagccggtcaacgaggcagacgccgcggccctcgagcacgacaaagcctatgaccggcagctcgacagcggagacaacccgtacctcaagtacaaccacgccgacgcggagtttcaggaacgccttaaagaagatacgtcttttgggggcaacctcggacgagcagtcttccaggcgaaaaagagggttcttgaacctctgggcctggttgaggaacctgttaagacggctccgggaaaaaagaggccggtagagcactctcctgtggagccagactcctcctcgggaaccggaaaggcgggccagcagcctgcaagaaaaagattgaattttggtcagactggagacgcagactcagtacctgacccccagcctctcggacagccaccagcagccccctctggtctgggaactaatacgatggctacaggcagtggcgcaccaatggcagacaataacgagggcgccgacggagtgggtaattcctcgggaaattggcattgcgattccacatggatgggcgacagagtcatcaccaccagcacccgaacctgggccctgcccacctacaacaaccacctctacaaacaaatttccagccaatcaggagcctcgaacgacaatcactactttggctacagcaccccttgggggtattttgacttcaacagattccactgccacttttcaccacgtgactggcaaagactcatcaacaacaactggggattccgacccaagagactcaagttcaagctctttaacattcaagtcaaagaggtcacgcagaatgacggtacgacgacgattgccaataaccttaccagcacggttcaggtgtttactgactcggagtaccagctcccgtacgtcctcggctcggcgcatcaaggatgcctcccgccgttcccagcagacgtcttcatggtgccacagtatggatacctcaccctgaacaacgggagtcaggcagtaggacgctcttcattttactgcctggagtactttccttctcagatgctgcgtaccggtaacaactttaccttcagctacacttttgaggacgttcctttccacagcagctacgctcacagccagagtctggaccgtctcatgaatcctctcatcgaccagtacctgtattacttgagcagaacagacactccaagtggaaccaccacgcagtcaaggcttcagttttctcaggccggagcgagtgacattcggaaccagtctaggaactggcttcctggaccctgttaccgccagcagcgagtatcaaagacatctgcggataacaacaacagtgaatactcgtggactggagctaccaagtaccacctcaatggcagagactctctggtgaatccgggcccggccatggcaagccacaaggacgatgaagaaaagttttttcctcagagcggggttctcatctttgggaagcaaggctcagagaaaacaagtgtggacattgaaaaggtcatgattacagacgaagaggaaatcaggacaaccaatcccgtggctacggagcagtatggttctgtatctaccaacctccagagaggcaacagacaagcagctaccgcagatgtcaacacacaaggcgttcttccaggcatggtctggcaggacagagatgtgtaccttcaggggcccatctgggcaaagattccacacacggacggacattttcacccctctcccctcatgggtggattcggacttaaacaccctcctccacagattctcatcaagaacaccccggtacctgcgaatccttcgaccaccttcagtgcggcaaagtttgcttccttcatcacacagtactccacgggacaggtcagcgtggagatcgagtgggagctgcagaaggaaaacagcaaacgctggaatcccgaagttcagtacacttccaactacaacaagtctgttaatgtggactttactgtggacactaatggcgtgtattcagagcctcgccccattggcaccagatacctgactcgtaatcagtaa

SEQ ID NO: 2956 - DNA, 2208 bp, Artificial Sequence
  Synthetic polynucleotide
atggctgccgatggttatcttccagattggctcgaggacactctctctgaaggaataagacagtggtggaagctcaaacctggcccaccaccaccaaagcccgcagagcggcataaggacgacagcaggggtcttgtgcttcctgggtacaagtacctcggacccttcaacggactcgacaagggagagccggtcaacgaggcagacgccgcggccctcgagcacgacaaagcctatgaccggcagctcgacagcggagacaacccgtacctcaagtacaaccacgccgacgcggagtttcaggagcgccttaaagaagatacgtcttttgggggcaacctcggacgagcagtcttccaggcgaaaaagagggttcttgaacctctgggcctggttgaggaacctgttaagacggctccgggaaaaaagaggccggtagagcactctcctgtggagccagactcctcctcgggaaccggaaaggcgggccagcagcctgcaagaaaaagattgaattttggtcagactggagacgcagactcagtacctgatccccagcctctcggacagccaccagcagccccctctggtctgggaactaatacgatggctacaggcagtggcgcaccaatggcagacaataacgagggcgccgacggagtgggtaattcctcgggaaattggcattgcgattccacatggatgggcgacagagtcatcaccaccagcacccgaacctgggccctgcccacctacaacaaccacctctacaaacaaatttccagccaatcaggagcctcgaacgacaatcactactttggctacagcaccccttgggggtattttgacttcaacagattccactgccacttttcaccacgtgactggcaaagactcatcaacaacaactggggattccgacccaagagactcaagttcaagctctttaacattcaagtcaaagaggtcacgcagaatgacggtacgacgacgattgccaataaccttaccagcacggttcaggtgtttactgactcggagtaccagctcccgtatgtcctcggctcggcgcatcaaggatgcctcccgccgttcccagcagacgtcttcatggtgccacagtatggatacctcaccctgaacaacgggagtcaggcagtaggacgctcttcattttactgcctggagtactttccttctcagatgctgcgtaccggtaacaactttaccttcagctacacttttgaggacgttcctttccacagcagctacgctcacagccagagtctggaccgtctcatgaatcctctcatcgaccagtacctgtattacttgagcagaacagacactccaagtggaaccaccacgcagtcaaggcttcagttttctcaggccggagcgagtgacattcgggaccagtctaggaactggcttcctggaccctgttaccgccagcagcgagtatcaaagacatctgcggataacaacaacagtgaatactcgtggactggagctaccaagtaccacctcaatggcagagactctctggtgaatccgggcccggccatggcaagccacaaggacgatgaagaaaagttttttcctcagagcggggttctcatctttgggaagcaaggctcagagaaaacaagtgtggacattgaaaaggtcatgattacagacgaagaggaaatcaggacaaccaatcccgtggctacggagcagtatggttctgtatctaccaacctccagagaggcaacagacaagcagctaccgcagatgtcaacacacaaggcgttcttccaggcatggtctggcaggacagagatgtgtaccttcaggggcccatctgggcaaagattccacacacggacggacattttcacccctctcccctcatgggtggattcggacttaaacaccctcctccacagattctcatcaagaacaccccggtacctgcgaatccttcgaccaccttcagtgcggcaaagtttgcttccttcatcacacagtactccacgggacaggtcagcgtggagatcgagtgggagctgcagaaggaaaacagcaaacgctggaatcccgaagttcagtacacttccaactacaacaagtctgttaatgtggactttactgtggacactaatggcgtgtattcagagcctcgccccattggcaccagatacctgactcgtaatctgtaa

SEQ ID NO: 2957 - protein, 735 aa, Artificial Sequence
  Synthetic polypeptide
MAADGYLPDWLEDTLSEGIRQWWKLKPGPPPPKPAERHKDDSRGLVLPGYKYLGPFNGLDKGEPVNEADAAALEHDKAYDRQLDSGDNPYLKYNHADAEFQERLKEDTSFGGNLGRAVFQAKKRVLEPLGLVEEPVKTAPGKKRPVEHSPVEPDSSSGTGKAGQQPARKRLNFGQTGDADSVPDPQPLGQPPAAPSGLGTNTMATGSGAPMADNNEGADGVGNSSGNWHCDSTWMGDRVITTSTRTWALPTYNNHLYKQISSQSGASNDNHYFGYSTPWGYFDFNRFHCHFSPRDWQRLINNNWGFRPKRLKFKLFNIQVKEVTQNDGTTTIANNLTSTVQVFTDSEYQLPYVLGSAHQGCLPPFPADVFMVPQYGYLTLNNGSQAVGRSSFYCLEYFPSQMLRTGNNFTFSYTFEDVPFHSSYAHSQSLDRLMNPLIDQYLYYLSRTDTPSGTTTQSRLQFSQAGASDIRDQSRNWLPGPCYRQQRVSKTSADNNNSEYSWTGATKYHLNGRDSLVNPGPAMASHKDDEEKFFPQSGVLIFGKQGSEKTSVDIEKVMITDEEEIRTTNPVATEQYGSVSTNLQRGNRQAATADVNTQGVLPGMVWQDRDVYLQGPIWAKIPHTDGHFHPSPLMGGFGLKHPPPQILIKNTPVPANPSTTFSAAKFASFITQYSTGQVSVEIEWELQKENSKRWNPEVQYTSNYNKSVNVDFTVDTNGVYSEPRPIGTRYLTRNL

SEQ ID NO: 2958 - DNA, 2601 bp, Artificial Sequence
  Synthetic polynucleotide
ccatcgacgtcagacgcggaagcttcgatcaactacgcggacaggtaccaaaacaaatgttctcgtcacgtgggcatgaatctgatgctgtttccctgcagacaatgcgagagactgaatcagaattcaaatatctgcttcactcacggtgtcaaagactgtttagagtgctttcccgtgtcagaatctcaacccgtttctgtcgtcaaaaaggcgtatcagaaactgtgctacattcatcacatcatgggaaaggtgccagacgcttgcactgcttgcgacctggtcaatgtggacttggatgactgtgtttctgaacaataaatgacttaaaccaggtatgactgccgatggttatcttccagattggctcgaggacaaccttagtgaaggaattcgcgagtggtgggctttgaaacctggagcccctcaacccaaggcaaatcaacaacatcaagacaacgctcgaggtcttgtgcttccgggttacaaataccttggacccggcaacggactcgacaagggggagccggtcaacgcagcagacgcggcggccctcgagcacgacaaggcctacgaccagcagctcaaggccggagacaacccgtacctcaagtacaaccacgccgacgccgagttccaggagcggctcaaagaagatacgtcttttgggggcaacctcgggcgagcagtcttccaggccaaaaagaggcttcttgaacctcttggtctggttgaggaagcggctaagacggctcctggaaagaagaggcctgtagagcagtctcctcaggaaccggactcctccgcgggtattggcaaatcgggtgcacagcccgctaaaaagagactcaatttcggtcagactggcgacacagagtcagtcccagaccctcaaccaatcggagaacctcccgcagccccctcaggtgtgggatctcttacaatggcttcaggtggtggcgcaccagtggcagacaataacgaaggtgccgatggagtgggtagttcctcgggaaattggcattgcgattcccaatggctgggggacagagtcatcaccaccagcacccgaacctgggccctgcccacctacaacaatcacctctacaagcaaatctccaacagcacatctggaggatcttcaaatgacaacgcctacttcggctacagcaccccctgggggtattttgacttcaacagattccactgccacttctcaccacgtgactggcagcgactcatcaacaacaactggggattccggcctaagcaactcaacttcaagctcttcaacattcaggtcaaagaggttacggacaacaatggagtcaagaccatcgccaataaccttaccagcacggtccaggtcttcacggactcagactatcagctcccgtacgtgctcgggtcggctcacgagggctgcctcccgccgttcccagcggacgttttcatgattcctcagtacgggtatctgacgcttaatgatggaagccaggccgtgggtcgttcgtccttttactgcctggaatatttcccgtcgcaaatgctaagaacgggtaacaacttccagttcagctacgagtttgagaacgtacctttccatagcagctacgctcacagccaaagcctggaccgactaatgaatccactcatcgaccaatacttgtactatctctcaaagactattaacggttctggacagaatcaacaaacgctaaaattcagtgtggccggacccagcaacatggctgtccagggaagaaactacatacctggacccagctaccgacaacaacgtgtctcaaccactgtgactcaaaacaacaacagcgaatttgcttggcctggagcttcttcttgggctctcaatggacgtaatagcttgatgaatcctggacctgctatggccagccacaaagaaggagaggaccgtttctttcctttgtctggatctttaatttttggcaaacaaggaactggaagagacaacgtggatgcggacaaagtcatgataaccaacgaagaagaaattaaaactactaacccggtagcaacggagtcctatggacaagtggccacaaaccaccagagtgcccaagcacaggcgcagaccggctgggttcaaaaccaaggaatacttccgggtatggtttggcaggacagagatgtgtacctgcaaggacccatttgggccaaaattcctcacacggacggcaactttcacccttctccgctgatgggagggtttggaatgaagcacccgcctcctcagatcctcatcaaaaacacacctgtacctgcggatcctccaacggccttcaacaaggacaagctgaactctttcatcacccagtattctactggccaagtcagcgtggagatcgagtgggagctgcagaaggaaaacagcaagcgctggaacccggagatccagtacacttccaactattacaagtctaataatgttgaatttgctgttaatactgaaggtgtatatagtgaaccccgccccattggcaccagatacctgactcgtaatctgtaattgcttgttaatcaataaaccgtttaattcgtttcagttgaactgcggcc

SEQ ID NO: 2959 - DNA, 2601 bp, Artificial Sequence
  Synthetic polynucleotide
ccatcgacgtcagacgcggaagcttcgatcaactacgcggacaggtaccaaaacaaatgttctcgtcacgtgggcatgaatctgatgctgtttccctgcagacaatgcgagagactgaatcagaattcaaatatctgcttcactcacggtgtcaaagactgtttagagtgctttcccgtgtcagaatctcaacccgtttctgtcgtcaaaaaggcgtatcagaaactgtgctacattcatcacatcatgggaaaggtgccagacgcttgcactgcttgcgacctggtcaatgtggacttggatgactgtgtttctgaacaataaatgacttaaaccaggtatggctgccgatggttatcttccagattggctcgaggacaaccttagtgaaggaattcgcgagtggtgggctttgaaacctggagcccctcaacccaaggcaaatcaacaacatcaagacaacgctcgaggtcttgtgcttccgggttacaaataccttggacccggcaacggactcgacaagggggagccggtcaacgcagcagacgcggcggccctcgagcacgacaaggcctacgaccagcagctcaaggccggagacaacccgtacctcaagtacaaccacgccgacgccgagttccaggagcggctcaaagaagatacgtcttttgggggcaacctcgggcgagcagtcttccaggccaaaaagaggcttcttgaacctcttggtctggttgaggaagcggctaagacggctcctggaaagaagaggcctgtagagcagtctcctcaggaaccggactcctccgcgggtattggcaaatcgggtgcacagcccgctaaaaagagactcaatttcggtcagactggcgacacagagtcagtcccagaccctcaaccaatcggagaacctcccgcagccccctcaggtgtgggatctcttacaatggcttcaggtggtggcgcaccagtggcagacaataacgaaggtgccgatggagtgggtagttcctcgggaaattggcattgcgattcccaatggctgggggacagagtcatcaccaccagcacccgaacctgggccctgcccacctacaacaatcacctctacaagcaaatctccaacagcacatctggaggatcttcaaatgacaacgcctacttcggctacagcaccccctgggggtattttgacttcaacagattccactgccacttctcaccacgtgactggcagcgactcatcaacaacaactggggattccggcctaagcgactcaacttcaagctcttcaacattcaggtcaaagaggttacggacaacaatggagtcaagaccatcgccaataaccttaccagcacggtccaggtcttcacggactcagactatcagctcccgtacgtgctcgggtcggctcacgagggctgcctcccgccgttcccagcggacgttttcatgattcctcagtacgggtatctgacgcttaatgatggaagccaggccgtgggtcgttcgtccttttactgcctggaatatttcccgtcgcaaatgctaagaacgggtaacaacttccagttcagctacgagtttgagaacgtacctttccatagcagctacgctcacagccaaagcctggaccgactaatgaatccactcatcgaccaatacttgtactatctctcaaagactattaacggttctggacagaatcaacaaacgctaaaattcagtgtggccggacccagcaacatggctgtccagggaagaaactacatacctggacccagctaccgacaacaacgtgtctcaaccactgtgactcaaaacaacaacagcgaatttgcttggcctggggcttcttcttgggctctcaatggacgtaatagcttgatgaatcctggacctgctatggccagccacaaagaaggagaggaccgtttctttcctttgtctggatctttaatttttggcaaacaaggaactggaagagacaacgtggatgcggacaaagtcatgataaccaacgaagaagaaattaaaactactaacccggtagcaacggagtcctatggacaagtggccacaaaccaccagagtgcccaagcacaggcgcagaccggctgggttcaaaaccaaggaatacttccgggtatggtttggcaggacagagatgtgtacctgcaaggacccatttgggccaaaattcctcacacgggcggcaactttcacccttctccgctgatgggagggtttggaatgaagcacccgcctcctcagatcctcatcaaaaacacacctgtacctgcggatcctccaacggccttcaacaaggacaagctgaactctttcatcacccagtattctactggccaagtcagcgtggagatcgagtgggagctgcagaaggaaaacagcaagcgctggaacccggagatccagtacacttccaactattacaagtctaataatgttgaatttgctgttaatactggaggtgtatatagtgaaccccgccccattggcaccagatacctgactcgtaatctgtaattgcttgttaatcaataaaccgtttaattcgtttcagttgaactgcggcc

SEQ ID NO: 2960 - DNA, 2601 bp, Artificial Sequence
  Synthetic polynucleotide
ccatcgacgtcagacgcggaagcttcgatcaactacgcggacaggtaccaaaacaaatgttctcgtcacgtgggcatgaatctgatgctgtttccctgcagacaatgcgagagactgaatcagaattcaaatatctgcttcactcacggtgtcaaagactgtttagagtgctttcccgtgtcagaatctcaacccgtttctgtcgtcaaaaaggcgtatcagaaactgtgctacattcatcacatcatgggaaaggtgccagacgcttgcactgcttgcgacctggtcaatgtggactcggatgactgtgtttctgaacaataaatgacttaaaccaggtatggctgccgatggttatcttccagattggctcgaggacaaccttagtgaaggaattcgcgagtggtgggctttgaaacctggagcccctcaacccaaggcaaatcaacaacatcaagacaacgctcgaggtcttgtgcttccgggttacaaataccttggacccggcaacggactcgacaagggggagccggtcaacgcagcagacgcggcggccctcgagcacgacaaggcctacgaccagcagctcaaggccggagacaacccgtacctcaagtacaaccacgccgacgccgagttccaggagcggctcaaagaagatacgtcttttgggggcaacctcgggcgagcagtcttccaggccaaaaagaggcttcttgaacctcttggtctggttgaggaagcggctaagacggctcctggaaagaagaggcctgtagagcagtctcctcaggaaccggactcctccgcgggtattgacaaatcgggtgcacagcccgctaaaaagagactcaatttcggtcagactggcgacacagagtcagtcccagaccctcaaccaatcggagaacctcccgcagccccctcaggtgtgggatctcttacaatggcttcaggtggtggcgcaccagtggcagacaataacgaaggtgccgatggagtgggtagttcctcgggaaattggcattgcgattcccaatggctgggggacagagtcatcaccaccagcacccgaacctgggccctgcccacctacaacaatcacctctacaagcaaatctccaacagcacatctggaggatcttcaaatgacaacgcctacttcggctacagcaccccctgggggtattttgacttcaacagattccactgccacttctcaccacgtgactggcagcgactcatcaacaacaactggggattccggcctaagcgactcaacttcaagctcttcaacattcaggtcaaagaggttacggacaacaatggagtcaagaccatcgccaataaccttaccagcacggtccaggtcttcacggactcggactatcagctcccgtacgtgctcgggtcggctcacgagggctgcctcccgccgttcccagcggacgttttcatgattcctcagtacgggtatctgacgcttaatgatggaagccaggccgtgggtcgttcgtccttttactgcctggaatatttcccgtcgcaaatgctaagaacgggtaacaacttccagttcagctacgagtttgagaacgtacctttccatagcagctacgctcacagccaaagcctggaccgactaatgaatccactcatcgaccaatacttgtactatctctcaaagactattaacggttctggacagaatcaacaaacgctaaaattcagtgtggccggacccagcaacatggctgtccagggaagaaactacatacctggacccagctaccgacaacaacgtgtctcaaccactgtgactcaaaacaacaacagcgaatttgcttggcctggagcttcttcttgggctctcaatggacgtaatagcttgatgaatcctggacctgctatggccagccacaaagaaggagaggaccgtttctttcctttgtctggatctttaatttttggcaaacaaggaactggaagagacaacgtggatgcggacaaagtcatgataaccaacgaagaagaaattaaaactactaacccggtagcaacggagtcctatggacaagtggccacaaaccaccagagtgcccaagcacaggcgcagaccggctgggttcaaaaccaaggaatacttccgggtatggtttggcaggacagagatgtgtacctgcaaggacccatttgggccaaaattcctcacacggacggcaactttcacccttctccgctgatgggagggtttggaatgaagcacccgcctcctcagatcctcatcaaaaacacacctgtacctgcggatcctccaacggccttcaacaaggacaagctgaactctttcatcacccagtattctactggccaagtcagcgtggagatcgagtgggagctgcagaaggaaaacagcaagcgctggaacccggagatccagtacacttccaactattacaagtctaataatgttgaatttgctgttaatactgaaggtgtatatagtgaaccccgccccattggcaccagatacctgactcgtaatctgtaattgcttgttaatcaataaaccgtttaattcgtttcagttgaactgcggcc

SEQ ID NO: 2961 - DNA, 2601 bp, Artificial Sequence
  Synthetic polynucleotide
ccatcgacgtcagacgcggaagcttcgatcaactacgcggacaggtaccaaaacaaatgttctcgtcacgtgggcatgaatctgatgctgtttccctgcagacaatgcgagagactgaatcagaattcaaatatctgcttcactcacggtgtcaaagactgtttagagtgctttcccgtgtcagaatctcaacccgtttctgtcgtcaaaaaggcgtatcagaaactgtgctacattcatcacatcatgggaaaggtgccagacgcttgcactgcttgcgacctggtcaatgtggacttggatgactgtgtttctgaacaataaatgacttaaaccaggtatggctgccgatggttatcttccagattggctcgaggacaaccttagtgaaggaattcgcgagtggtgggctttgaaacctggagcccctcaacccaaggcaaatcaacaacatcaagacaacgctcgaggtcttgtgcttccgggttacaaataccttggacccggcaacggactcgacaagggggagccggtcaacgcagcagacgcggcggccctcgagcacgacaaggcctacgaccagcagctcaaggccggagacaacccgtacctcaagtacaaccacgccgacgccgagttccaggagcggctcaaagaagatacgtcttttgggggcaacctcgggcgagcagtcctccaggccaaaaagaggcttcttgaacctcttggtctggttgaggaagcggctaagacggctcctggaaagaagaggcctgtagagcagtctcctcaggaaccggactcctccgcgggtattggcaaatcgggtgcacagcccgctaaaaagagactcaatttcggtcagactggcgacacagagtcagtcccagaccctcaaccaatcggagaacctcccgcagccccctcaggtgtgggatctcttacaatggcttcaggtggtggcgcaccagtggcagacaataacgaaggtgccgatggagtgggtagttcctcgggaaattggcattgcgattcccaatggctgggggacagagtcatcaccaccagcacccgaacctgggccctgcccacctacaacaatcacctctacaagcaaatctccaacagcacatctggaggatcttcaaatgacaacgcctacttcggctacagcaccccctgggggtattttgacttcaacagattccactgccacttctcaccacgtgactggcagcgactcatcaacaacaactggggattccggcctaagcgactcaacttcaagctcttcaacattcaggtcaaagaggttacggacaacaatggagtcaagaccatcgccaataaccttaccagcacggtccaggtcttcacggactcagactatcagctcccgtacgtgctcgggtcggctcacgagggctgcctcccgccgttcccagcggacgttttcatgattcctcagtacgggtatctgacgcttaatgatggaagccaggccgtgggtcgttcgtccttttactgcctggaatatttcccgtcgcaaatgctaagaacgggtaacaacttccagttcagctacgagtttgagaacgtacctttccatagcagctacgctcacagccaaagcctggaccgactaatgaatccactcatcgaccaatacttgtactatctctcaaagactattaacggttctggacagaatcaacaaacgctaaaattcagtgtggccggatccagcaacatggctgtccagggaagaaactacatacctggacccagctaccgacaacaacgtgtctcaaccactgtgactcaaaacaacaacagcgaatttgcttggcctggagcttcttcttgggctctcaatggacgtaatagcttgatgaatcctggacctgctatggccagccacaaagaaggagaggaccgtttctttcctttgtctggatctttaatttttggcaaacaaggaactggaagagacaacgtggatgcggacaaagtcatgataaccaacgaagaagaaattaaaactactaacccggtagcaacggagtcctatggacaagtggccacaaaccaccagagtgcccaagcacaggcgcagaccggctgggttcaaaaccaaggaatacttccaggtatggtttggcaggacagagatgtgtacctgcaaggacccatttgggccaaaattcctcacacggacggcaactttcacccttctccgctgatgggagggtttggaatgaagcacccgcctcctcagatcctcatcaaaaacacacctgtacctgcggatcctccaacggccttcaacaaggacaagctgaactctttcatcacccagtattctactggccaagtcagcgtggagatcgagtgggagctgcagaaggaaaacagcaagcgctggaacccggagatccagtacacttccaactattacaagtctaataatgttgaatttgctgttaatactgaaggtgtatatagtgaaccccgccccattggcaccagatacctgactcgtaatctgtaattgcttgttaatcaataaaccgtttaattcgtttcagttgaactgcggcc

SEQ ID NO: 2962 - DNA, 2601 bp, Artificial Sequence
  Synthetic polynucleotide
ccatcgacgtcagacgcggaagcttcgatcaactacgcggacaggtaccaaaacaaatgttctcgtcacgtgggcatgaatctgatgctgtttccctgcagacaatgcgagagactgaatcagaattcaaatatctgcttcactcacggtgtcaaagactgtttagagtgctttcccgtgtcagaatctcaacccgtttctgtcgtcaaaaaggcgtatcagaaactgtgctacattcatcacatcatgggaaaggtgccagacgcttgcactgcttgcgacctggtcaatgtggacttggatgactgtgtttctgaacaataaatgacttaaaccaggtatggctgccgatggttatcttccagattggctcgaggacaaccttagtgaaggaattcgcgagtggtgggctttgaaacctggagcccctcaacccaaggcaaatcaacaacatcaagacaacgctcgaggtcttgtgcttccgggttacaaataccttggacccggcaacggactcgacaagggggagccggtcaacgcagcagacgcggcggccctcgagcacgacagggcctacgaccagcagctcaaggccggagacaacccgtacctcaagtacaaccacgccgacgccgagttccaggagcggctcaaagaagatacgtcttttgggggcaacctcgggcgagcagtcttccaggccaaaaagaggcttcttgaacctcttggtctggttgaggaagcggctaagacggctcctggaaagaagaggcctgtagagcagtctcctcaggaaccggactcctccgcgggtattggcaaatcgggtgcacagcccgctaaaaagagactcaatttcggtcagactggcgacacagagtcagtcccagaccctcaaccaatcggagaacctcccgcagccccctcaggtgtgggatctcttacaatggcttcaggtggtggcgcaccagtggcagacaataacgaaggtgccgatggagtgggtagttcctcgggaaattggcattgcgattcccaatggctgggggacagagtcatcaccaccagcacccgaacctgggccctgcccacctacaacaatcacctctacaagcaaatctccaacagcacatctggaggatcttcaaatgacaacgcctacttcggctacagcaccccctgggggtattttgacttcaacagattccactgccacttctcaccacgtgactggcagcgactcatcaacaacaactggggattccggcctaagcgactcaacttcaagctcttcaacattcaggtcaaagaggttacggacaacaatggagtcaagaccatcgccaataaccttaccagcacggtccaggtcttcacggactcagactatcagctcccgtacgtgctcgggtcggctcacgagggctgcctcccgccgttcccagcggacgttttcatgattcctcagtacgggtatctgacgcttaatgatggaagccaggccgtgggtcgttcgtccttttactgcctggaatatttcccgtcgcaaatgctaagaacgggtaacaacttccagttcagctacgagtttgagaacgtacctttccatagcagctacgctcacagccaaagcctggaccgactaatgaatccactcatcgaccaatacttgtactatctctcaaagactattaacggttctggacagaatcaacaaacgctaaaattcagtgtggccggacctagcaacatggctgtccagggaagaaactacatacctggacccagctaccgacaacaacgtgtctcaaccactgtgactcaaaacaacaacagcgaatttgcttggcctggagcttcttcttgggctctcaatggacgtaatagcttgatgaatcctggacctgctatggccagccacaaagaaggagaggaccgtttctttcctttgtctggatctttaatttttggcaaacaaggaactggaagagacaacgtggatgcggacaaagtcatgataaccaacgaagaagaaattaaaactactaacccggtagcaacggagtcctatggacaagtggccacaaaccaccagagtgcccaagcacaggcgcagaccggctgggttcaaaaccaaggaatacttccgggtatggtttggcaggacagagatgtgtacctgcaaggacccatttgggccaaaattcctcacacggacggcaactttcacccttctccgctgatgggagggtttggaatgaagcacccgcctcctcagatcctcatcaaaaacacacctgtacctgcggatcctccaacggccttcaacaaggacaagctgaactctttcatcacccagtattctactggccaagtcagcgtggagatcgagtgggagctgcagaagaaaaacagcaagcgctggaacccggagatccagtacacttccaactattacaagtctaataatgttgaatttgctgttaacactgaaggtgtatatagtgaaccccgccccattggcaccagatacctgactcgtaatctgtaattgcttgttaatcaataaaccgtttaattcgtttcagttgaactgcggcc

SEQ ID NO: 2963 - DNA, 2601 bp, Artificial Sequence
  Synthetic polynucleotide
ccatcgacgtcagacgcggaagcttcgatcaactacgcggacaggtaccaaaacaaatgttctcgtcacgtgggcatgaatctgatgctgtttccctgcagacaatgcgagagactgaatcagaattcaaatatctgcttcactcacggtgtcaaagactgtttagagtgctttcccgtgtcagaatctcaacccgtttctgtcgtcaaaaaggcgtatcagaaactgtgctacattcatcacatcatgggaaaggtgccagacgcttgcactgcttgcgacctggtcaatgtggacttggatgactgtgtttctgaacaataaatgacttaaaccaggtatggctgccgatggttatcttccagattggctcgaggacaaccttagtgaaggaattcgcgagtggtgggctttgaaacctggagcccctcaacccaaggcaaatcaacaacatcaagacaacgctcgaggtcttgtgcttccgggttacaaataccttggacccggcaacggactcgacaagggggagccggtcaacgcagcagacgcggcggccctcgagcacgacaaggcctacgaccagcagctcaaggccggagacaacccgtacctcaagtacaaccacgccgacgccgagttccaggagcggctcaaagaagatacgtcttttgggggcaacctcgggcgagcagtcttccaggccaaaaagaggcttcttgaacctcttggtctggttgaggaagcggctaagacggctcctggaaagaagaggcctgtagagcagtctcctcaggaaccggactcctccgcgggtattggcaaatcgggtgcacagcccgctaaaaagagactcaatttcggtcagactggcgacacagagtcagtcccagaccctcaaccaatcggagaacctcccgcagccccctcaggtgtgggatctcttacaatggcttcaggtggtggcgcaccagtggcagacaataacgaaggtgccgatggagtgggtagttcctcgggaaattggcattgcgattcccaatggctgggggacagagtcatcaccaccagcacccgaacctgggccctgcccacctacaacaatcacctctacaagcaaatctccaacagcacatctggaggatcttcaaatgacaacgcctacttcggctacagcaccccctgggggtattttgacttcaacagattccactgccacttctcaccacgtgactggcagcgactcatcaacaacaactggggattccggcctaagcgactcaacttcaagctcttcaacattcaggtcaaagaggttacggacaacaatggagtcaagaccatcgccaataaccttaccagcacggtccaggtcttcacggactcagactatcagctcccgtacgtgctcgggtcggctcacgagggctgcctcccgccgttcccagcggacgttttcatgattcctcagtacgggtatctgacgcttaatgatggaagccaggccgtgggtcgttcgtccttttactgcctggaatatttcccgtcgcaaatgctaagaacgggtaacaacttccagttcagctacgagtttgagaacgtacctttccatagcagctacgctcacagccaaagcctggaccgactaatgaatccactcatcgaccaatacttgtactatctctcaaagactattaacggttctggacagaatcaacaaacgctaaaattcagtgtggccggacccagcaacatggctgtccagggaagaaactacatacctggacccagctaccgacaacaacgtgtctcaaccactgtgactcaaaacaacaacagcgaatttgcttggcctggagcttcttcttgggctctcaatggacgtaatagcttgatgaatcctggacctgctatggccagccacaaagaaggagaggaccgtttctttcctttgtctggatctttaatttttggcaaacaaggaactggaagagacaacgtggatgcggacaaagtcatgataaccaacgaagaagaaattaaaactactaacccggtagcaacggagtcctatggacaagtggccacaaaccaccagagtgcccaagcacgggcgcagaccggctgggttcaaaaccaaggaatacttccgggtatggtttggcaggacagagatgtgtacctgcaaggacccatttgggccaaaattcctcacacggacggcaactttcacccttctccgctgatgggagggtttggaatgaagcacccgcctcctcagatcctcatcaaaaacacacctgtacctgcggatcctccaacggccttcaacaaggacaagctgaactctttcatcacccagtattctactggccaagtcagcgtggagatcgagtgggagctgcagaaggaaaacagcaagcgctggaacccggagatccagtacacttccaactattacaagtctaataatgttgaatttgctgttaatactgaaggtgtatatagtgaaccccgccccattggcaccagatacctgactcgtaatctgtaattgcttgttaatcaataaaccgtttaattcgtttcagttgaactgcggcc

SEQ ID NO: 2964 - DNA, 2601 bp, Artificial Sequence
  Synthetic polynucleotide
ccatcgacgtcagacgcggaagcttcgatcaactacgcggacaggtaccaaaacaaatgttctcgtcacgtgggcatgaatctgatgctgtttccctgcagacaatgcgagagactgaatcagaattcaaatatctgcttcactcacggtgtcaaagactgtttagagtgctttcccgtgtcagaatctcaacccgtttctgtcgtcaaaaaggcgtatcagaaactgtgctacattcatcacatcatgggaaaggtgccagacgcttgcactgcttgcgacctggtcaatgtggacttggatgactgtgtttctgaacaataaatgacttaaaccaggtatggctgccgatggttatcttccagattggctcgaggacaaccttagtgaaggaattcgcgagtggtgggctttgaaacctggagcccctcaacccaaggcaaatcaacaacatcaagacaacgctcgaggtcttgtgcttccgggttacaaataccttggacccggcaacggactcgacaagggggagccggtcaacgcagtagacgcggcggccctcgagcacgacaaggcctacgaccagcagctcaaggccggagacaacccgtacctcaagtacaaccacgccgacgccgagttccaggagcggctcaaagaagatacgtcttttgggggcaacctcgggcgagcagtcttccaggccaaaaagaggcttcttgaacctcttggtctggttgaggaagcggctaagacggctcctggaaagaagaggcctgtagagcagtctcctcaggaaccggactcctccgcgggtattggcaaatcgggtgcacagcccgctaaaaagagactcaatttcggtcagactggcgacacagagtcagtcccagaccctcaaccaatcggagaacctcccgcagccccctcaggtgtgggatctcttacaatggcttcaggtggtggcgcaccagtggcagacaataacgaaggtgccgatggagtgggtagttcctcgggaaattggcattgcgattcccaatggctgggggacagagtcatcaccaccagcacccgaacctgggccctgcccacctacaacaatcacctctacaagcaaatctccaacagcacatctggaggatcttcaaatgacaacgcctacttcggctacagcaccccctgggggtattttgacttcaacagattccactgccacttctcaccacgtgactggcagcgactcatcaacaacaactggggatttcggcctaagcgactcaacttcaagctcttcaacattcaggtcaaagaggttacggacaacaatggagtcaagaccatcgccaataaccttaccagcacggtccaggtcttcacggactcagactatcagctcccgtacgtgctcgggtcggctcacgagggctgcctcccgccgttcccagcggacgttttcatgattcctcagtacgggtatctgacgcttaatgatggaagccaggccgtgggtcgttcgtccttttactgcctggaatatttcccgtcgcaaatgctaagaacgggtaacaacttccagttcagctacgagtttgagaacgtacctttccatagcagctacgctcacagccaaagcctggaccgactaatgaatccactcatcgaccaatacttgtactatctctcaaagactattaacggttctggacagaatcaacaaacgctaaaattcagtgtggccggacccagcaacatggctgtccagggaagaaactacatacctggacccagctaccgacaacaacgtgtctcaaccactgtgactcaaaacaacaacagcgaatttgcttggcctggagcttcttcttgggctctcaatggacgtaatagcttgatgaatcctggacctgctatggccagccacaaagaaggagaggaccgtttctttcctttgtctggatctttaatttttggcaaacaaggaactggaagagacaacgtggatgcggacaaagtcatgataaccaacgaagaagaaattaaaactactaacccggtagcaacggagtcctatggacaagtggccacaaaccaccagagtgcccaagcacaggcgcagaccggctgggttcaaaaccaaggaatacttccgggtatggtttggcaggacagagatgtgtacctgcaaggacccatttgggccaaaattcctcacacggacggcaactttcacccttctccgctgatgggagggtttggaatgaagcacccgcctcctcagatcctcatcaaaaacacacctgtacctgcggatcctccaacggccttcaacaaggacaagctgaactctttcatcacccagtattctactggccaagtcagcgtggagatcgagtgggagctgcagaaggaaaacagcaagcgctggaacccggagatccagtacacttccaactattacaagtctaataatgttgaatttgctgttaatactgaaggtgtatatagtgaaccccgccccattggcaccagatacctgactcgtaatctgtaattgcttgttaatcaataaaccgtttaattcgtttcagttgaactgcggcc

SEQ ID NO: 2965 - DNA, 2580 bp, Artificial Sequence
  Synthetic polynucleotide
ccatcgacgtcagacgcggaagcttcgatcaactacgcggacaggtaccaaaacaaatgttctcgtcacgtgggcatgaatctgatgctgtttccctgcagacaatgcgagagactgaatcagaattcaaatatctgcttcactcacggtgtcaaagactgtttagagtgctttcccgtgtcagaatctcaacccgtttctgtcgtcaaaaaggcgtatcagaaactgtgctacattcatcacatcatgggaaaggtgccagacgcttgcactgcttgcgacctggtcaatgtggacttggatgactgtgtttctgaacaataaatgacttaaaccaggtatggctgccgatggttatcttccagattggctcgaggacaaccttagtgaaggaattcgcgagtggtgggctttgaaacctggagcccctcaacccaaggcaaatcaacaacatcaagacaacgctcgaggtcttgtgcttccgggttacaaataccttggacccggcaacggactcgacaagggggagccggtcaacgcagcagacgcggcggccctcgagcacgacaaggcctacgaccagcagctcaaggccggagacaacccgtacctcaagtacaaccacgccgacgccgagttccaggagcggctcaaagaagatacgtcttttgggggcaacctcgggcgagcagtcttccaggccaaaaagaggcttcttgaacctcttggtctggttgaggaagcggctaagacggctcctggaaagaagaggcctgtagagcagtctcctcgggaaccggactcctccgcgggtattggcaaatcgggtgcacagcccgctaaaaagagactcaatttcggtcagactggcgacacagagtcagtcccagaccctcaaccaatcggagaacctcccgcagccccctcaggtgtgggatctcttacaatggcttcaggtggtggcgcaccagtggcagacaataacgaaggtgccgatggagtgggtagttcctcgggaaattggcattgcgattcccaatggctgggggacagagtcatcaccaccagcacccgaacctgggccctgcccacctacaacaatcacctctacaagcaaatctccaacagcacatctggaggatcttcaaatgacaacgcctacttcggctacagcaccccctgggggtattttgacttcaacagattccactgccacttctcaccacgtgactggcagcgactcatcaacaacaactggggattccggcctaagcgactcaacttcaagctcttcaacattcaggtcaaagaggttacggacaacaatggagtcaagaccatcgccaataaccttaccagcacggtccaggtcttcacggactcagactatcagctcccgtacgtgctcgggtcggctcacgagggctgcctcccgccgttcccagcggacgttttcatgattcctcagtacgggtatctgacgcttaatgatggaagccaggccgtgggtcgttcgtccttttactgcctggaatatttcccgtcgcaaatgctaagaacgggtaacaacttccagttcagctacgagtttgagaacgtacctttccatagcagctacgctcacagccaaagcctggaccgactaatgaatccactcatcgaccaatacttgtactatctctcaaagactattaacggttctggacagaatcaacaaacgctaaaattcagtgtggccggacccagcaacatggctgtccagggaagaaactacatacctggacccagctaccgacaacaacgtgtctcaaccactgtgactcaaaacaacaacagcgaatttgcttggcctggagcttcttcttgggctctcaatggacgtaatagcttgatgaatcctggacctgctatggccagccacaaagaaggagaggaccgtttctttcctttgtctggatctttaatttttggcaaacaaggaactggaagagacaacgtggatgcggacaaagtcatgataaccaacgaagaagaaattaaaactactaacccggtagcaacggagtcctatggacaagtggccacaaaccaccagagtgcccaagcacaggcgcagaccggctgggttcaaaaccaaggaatacttccgggtatggtttggcaggacagagatgtgtacctgcaaggacccatttgggccaaaattcctcacacggacggcaactttcacccttctccgctgatgggagggtttggaatgaagcacccgcctcctcagatcctcatcaaaaacacacctgtacctgcggatcctccaacggccttcaacaaggacaagctgaactctttcatcacccagtattctactggccaagtcagcgtggagatcgagtgggaactgcagaaggaaaacagcaagcgctggaacccggagatccagtacacttccaactattacaagtctaataatgttgaatttgctgttaatactgaaggtgtatatagtgaaccccgccccattggcaccagatacctgactcgtaatctgtaattgcttgttaatcaataaaccgtttaatt

SEQ ID NO: 2966 - DNA, 2601 bp, Artificial Sequence
  Synthetic polynucleotide
ccatcgacgtcagacgcggaagcttcgatcaactacgcggacaggtaccaaaacaaatgttctcgtcacgtgggcatgaatctgatgctgtttccctgcagacaatgcgagagactgaatcagaattcaaatatctgcttcactcacggtgtcaaagactgtttagagtgctttcccgtgtcagaatctcaacccgtttctgtcgtcaaaaaggcgtatcagaaactgtgctacattcatcacatcatgggaaaggtgccagacgcttgcactgcttgcgacctggtcaatgtggacttggatgactgtgtttctgaacaataaatgacttaaaccaggtatggctgccgatggttatcttccagattggctcgaggacaaccttagtgaaggaattcgcgagtggtgggctttgaaacctggagcccctcaacccaaggcaaatcaacaacatcaagacaacgctcgaggtcttgtgcttccgggttacaaataccttggacccggcaacggactcgacaagggggagccggtcaacgcagcagacgcggcggccctcgagcacgacaaggcctacgaccagcagctcaaggccggagacaacccgtacctcaagtacaaccacgccgacgccgagttccaggagcggctcaaagaagatacgtcttttgggggcaacctcgggcgagcagtctttcaggccaaaaagaggcttcttgaacctcttggtctggttgaggaagcggctaagacggctcctggaaagaagaggcctgtagagcagtctcctcaggaaccggactcctccgcgggtattggcaaatcgggtgcacagcccgctaaaaagagactcaatttcggtcagactggcgacacagagtcagtcccagaccctcaaccaatcggagaacctcccgcagccccctcaggtgtgggatctcttacaatggcttcatgtggtggcgcaccagtggcagacaataacgaaggtgccgatggagtgggtagttcctcgggaaattggcattgcgattcccaatggctgggggacagagtcatcaccaccagcacccgaacctgggccctgcccacctacaacaatcacctctacaagcaaatctccaacagcacatctggaggatcttcaaatgacaacgcctacttcggctacagcaccccctgggggtattttgacttcaacagattccactgccacttctcaccacgtgactggcagcgactcatcaacaacaactggggattccggcctaagcgactcaacttcaagctcttcaacattcaggtcaaagaggttacggacaacaatggagtcaagaccatcgccaataaccttaccagcacggtccaggtcttcacggactcagactatcagctcccgtacgtgctcgggtcggctcacgagggctgcctcccgccgttcccagcggacgttttcatgattcctcagtacgggtatctgacgcttaatgatggaagccaggccgtgggtcgttcgtccttttactgcctggaatatttcccgtcgcaaatgctaagaacgggtaacaacttccagttcagctacgagtttgagaacgtacctttccatagcagctacgctcacagccaaagcctggaccgactaatgaatccactcatcgaccaatacttgtactatctctcaaagactattaacggttctggacagaatcaacaaacgctaaaattcagtgtggccggacccagcaacatggctgtccagggaagaaactacatacctggacccagctaccgacaacaacgtgtctcaaccactgtgactcaaaacaacaacagcgaatttgcttggcctggagcttcttcttgggctctcaatggacgtaatagcttgatgaatcctggacctgctatggccagccacaaagaaggagaggaccgtttctttcctttgtctggatctttaatttttggcaaacaaggaactggaagagacaacgtggatgcggacaaagtcatgataaccaacgaagaagaaattaaaactactaacccggtagcaacggagtcctatggacaagtggccacaaaccaccagagtgcccaagcacaggcgcagaccggctgggttcaaaaccaaggaatacttccgggtatggtttggcaggacagagatgtgtacctgcaaggacccatttgggccaaaattcctcacacggacggcaactttcacccttctccgctgatgggagggtttggaatgaagcacccgcctcctcagatcctcatcaaaaacacacctgtacctgcggatcctccaacggccttcaacaaggacaagctgaactctttcatcacccagtattctactggccaagtcagcgtggagatcgagtgggagctgcagaaggaaaacagcaagcgctggaacccggagatccagtacacttccaactattacaagtctaataatgttgaatttgctgttaatactgaaggtgtatatagtgaaccccgccccattggcaccagatacctgactcgtaatctgtaattgcttgttaatcaataaaccgtttaattcgtttcagttgaactgcggcc

SEQ ID NO: 2967 - DNA, 2601 bp, Artificial Sequence
  Synthetic polynucleotide
ccatcgacgtcagacgcggaagcttcgatcaactacgcggacaggtaccaaaacaaatgttctcgtcacgtgggcatgaatctgatgctgtttccctgcagacaatgcgagagactgaatcagaattcaaatatctgcttcactcacggtgtcaaagactgtttagagtgctttcccgtgtcagaatctcaacccgtttctgtcgtcaaaaaggcgtatcagaaactgtgctacattcatcacatcatgggaaaggtgccagacgcttgcactgcttgcgacctggtcaatgtggacttggatgactgtgtttctgaacaataaatgacttaaaccaggtatggctgccgatggttatcttccagattggctcgaggacaaccttagtgaaggaattcgcgagtggtgggctttgaaacctggagcccctcaacccaaggcaaatcaacaacatcaagacaacgctcgaggtcttgtgcttccgggttacaaataccttggacccggcaacggactcgacaagggggagccgatcaacgcagcagacgcggcggccctcgagcacgacaaggcctacgaccagcagctcaaggccggagacaacccgtacctcaagtacaaccacgccgacgccgagttccaggagcggctcaaagaagatacgtcttttgggggcaacctcgggcgagcagtcttccaggccaaaaagaggcttcttgaacctcttggtctggttgaggaagcggctaagacggctcctggaaagaagaggcctgtagagcagtctcctcaggaaccggactcctccgcgggtattggcaaatcgggtgcacagcccgctaaaaagagactcaatttcggtcagactggcgacacagagtcagtcccagaccctcaaccaatcggagaacctcccgcagccccctcaggtgtgggatctcttacaatggcttcaggtggtggcgcaccagtggcagacaataacgaaggtgccgatggagtgggtagttcctcgggaaattggcattgcgattcccaatggctgggggacagagtcatcaccaccagcacccgaacctgggccctgcccacctacaacaatcacctctacaagcaaatctccaacagcacatctggaggatcttcaaatgacaacgcctacttcggctacagcaccccctgggggtattttgacttcaacagattccactgccacttctcaccacgtgactggcagcgactcatcaacaacaactggggattccggcctaagcgactcaacttcaagctcttcaacattcaggtcaaagaggttacggacaacaatggagtcaagaccatcgccaataaccttaccagcacggtccaggtcttcacggactcagactatcagctcccgtacgtgctcgggtcggctcacgagggctgcctcccgccgttcccagcggacgttttcatgattcctcagtacgggtatctgacgcttaatgatggaagccaggccgtgggtcgttcgtccttttactgcctggaatatttcccgtcgcaaatgctaagaacgggtaacaacttccagttcagctacgagtttgagaacgtacctttccatagcagctacgctcacagccaaagcctggaccgactaatgaatccactcatcgaccaatacttgtactatctctcaaagactattaacggttctggacagaatcaacaaacgctaaaattcagtgtggccggacccagcaacatggctgtccagggaagaaactacatacctggacccagctaccgacaacaacgtgtctcaaccactgtgactcaaaacaacaacagcgaatttgcttggcctggagcttcttcttgggctctcaatggacgtaatagcttgatgaatcctggacctgctatggccagccacaaagaaggagaggaccgtttctttcctttgtctggatctttaatttttggcaaacaaggaactggaagagacaacgtggatgcggacaaagtcatgataaccaacgaagaagaaattaaaactactaacccggtagcaacggagtcctatggacaagtggccacaaaccaccagagtgcccaagcacaggcgcagaccggctgggttcaaaaccaaggaatacttccgggtatggtttggcaggacagagatgtgtacctgcaaggacccatttgggccaaaattcctcacacgtacggcaactttcacccttctccgctgatgggagggtttggaatgaagcacccgcctcctcagatcctcatcaaaaacacacctgtacctgcggatcctccaacggccttcaacaaggacaagctgaactctttcatcacccagtattctactggccaagtcagcgtggagatcgagtgggagctgcagaaggaaaacagcaagcgctggaacccggagatccagtacacttccaactattacaagtctaataatgttgaatttgctgttaatactgaaggtgtatatagtgaaccccgccccattggcaccagatacctgactcgtaatctgtaattgcttgttaatcaataaaccgtttaattcgtttcagttgaactgcggcc

SEQ ID NO: 2968 - DNA, 2601 bp, Artificial Sequence
  Synthetic polynucleotide
ccatcgacgtcagacgcggaagcttcgatcaactacgcggacaggtaccaaaacaaatgttctcgccacgtgggcatgaatctgatgctgtttccctgcagacaatgcgagagactgaatcagaattcaaatatctgcttcactcacggtgtcaaagactgtttagagtgctttcccgtgtcagaatctcaacccgtttctgtcgtcaaaaaggcgtatcagaaactgtgctacattcatcacatcatgggaaaggtgccagacgcttgcactgcttgcgacctggtcaatgtggacttggatgactgtgtttctgaacaataaatgacttaaaccaggtatggctgccgatggttatcttccagattggctcgaggacaaccttagtgaaggaattcgcgagtggtgggctttgaaacctggagcccctcaacccaaggcaaatcaacaacatcaagacaacgctcgaggtcttgtgcttccgggttacaaataccttggacccggcaacggactcgacaagggggagccggtcaacgcagcagacgcggcggccctcgagcacgacaaggcctacgaccagcagctcaaggccggagacaacccgtacctcaagtacaaccacgccgacgccgagttccaggagcggctcaaagaagatacgtcttttgggggcaacctcgggcgagcagtcttccaggccaaaaagaggcttcttgaacctcttggtctggttgaggaagcggctaagacggctcctggaaagaagaggcctgtagagcagtctcctcaggaaccggactcctccgcgggtattggcaaatcgggtgcacagcccgctaaaaagagactcaatttcggtcagactggcgacacagagtcagtcccagaccctcaaccaatcggagaacctcccgctgccccctcaggtgtgggatctcttacaatggcttcaggtggtggcgcaccagtggcagacaataacgaaggtgccgatggagtgggtagttcctcgggaaattggcattgcgattcccaatggctgggggacagagtcatcaccaccagcacccgaacctgggccctgcccacctacaacaatcacctctacaagcaaatctccaacagcacatctggaggatcttcaaatgacaacgcctacttcggctacagcaccccctgggggtattttgacttcaacagattccactgccacttctcaccacatgactggcagcgactcatcaacaacaactggggattccggcctaagcgactcaacttcaagctcttcaacattcaggtcaaagaggttacggacaacaatggagtcaagaccatcgccaataaccttaccagcacggtccaggtcttcacggactcagactatcagctcccgtacgtgctcgggtcggctcacgagggctgcctcccgccgttcccagcggacgttttcatgattcctcagtacgggtatctgacgcttaatgatggaagccaggccgtgggtcgttcgtccttttactgcctggaatatttcccgtcgcaaatgctaagaacgggtaacaacttccagttcagctacgagtttgagaacgtacctttccatagcagctacgctcacagccaaagcctggaccgactaatgaatccactcatcgaccaatacttgtactatctctcaaagactattaacggttctggacagaatcaacaaacgctaaaattcaatgtggccggacccagcaacatggctgtccagggaagaaactacatacctggacccagctaccgacaacaacgtgtctcaaccactgtgactcaaaacaacaacagcgaatttgcctggcctagagcttcttcttgggctctcaatggacgtaatagcttgatgaatcctggacctgctatggccagccacaaagaaggagaggaccgtttctttcctttgtctggatctttaatttttggcaaacaaggaactggaagagacaacgtggatgcggacaaagtcatgataaccaacgaagaagaaattaaaactactaacccggtagcaacggagtcctatggacaagtggccacaaaccaccagagtgcccaagcacaggcgcagaccggctgggttcaaaaccaaggaatacttccgggtatggtttggcaggacagagatgtgtacctgcaaggacccatttgggccaaaattcctcacacggacggcaactttcacccttctccgctgatgggagggtttggaatgaagcacccgcctcctcagatcctcatcaaaaacacacctgtacctgcggatcctccaacggccttcaacaaggacaagctgaactctttcatcacccagtattctactggccaagtcagcatggagatcgagtgggagctgcagaaggaaaacagcaagcgctggaacccggagatccagtacacttccaactattacaagtctaataatgttgaatttgctgttaatactgaaggtgtatatagtgaaccccgccccattggcaccagatacctgactcgtaatctgtaattgcttgttaatcaataaaccgtttaattcgtttcagttgaactgcggcc

SEQ ID NO: 2969 - DNA, 2601 bp, Artificial Sequence
  Synthetic polynucleotide
ccatcgacgtcagacgcggaagcttcgatcaactacgcggacaggtaccaaaacaaatgttctcgtcacgtgggcatgaatctgatgctgtttccctgcagacaatgcgagagactgaatcagaattcaaatatctgcttcactcacggtgtcaaagactgtttagagtgctttcccgtgtcagaatctcaacccgtttctgtcgtcaaaaaggcgtatcagaaactgtgctacattcatcacatcatgggaaaggtgccagacgcttgcactgcttgcgacctggtcaatgtggacttggatgactgtgtttctgaacaataaatgacttaaaccaggtatggctgccgatggttatcttccagattggctcgaggacaaccttagtgaaggaattcgcgagtggtgggctttgaaacctggagcccctcaacccaaggcaaatcaacaacatcaagacaacgctcgaggtcttgtgcttccgggttacaaataccttggacccggcaacggactcgacaagggggagccggtcaacgcagcagacgcggcggccctcgagcacgacaaggcctacgaccagcagctcaaggccggagacaacccgtacctcaagtacaaccacgccgacgccgagttccaggagcggctcaaagaagatacgtcttttgggggcaacctcgggcgagcagtcttccaggccaaaaagaggcttcttgaacctcttggtctggttgaggaagcggctaagacggctcctggaaagaagaggcctgtagagcagtctcctcaggaaccggactcctccgcgggtattggcaaatcgggtgcacagcccgctaaaaagagactcaatttcggtcagactggcgacacagagtcagtcccagaccctcaaccaatcggagaacctcccgcagccccctcaggtgtgggatctcttacaatggcttcaggtggtggcgcaccagtggcagacaataacgaaggtgccgatggagtgggtagttcctcgggaaattggcattgcgattcccaatggctgggggacagagtcatcaccaccagcacccgaacctgggccctgcccacctacaacaatcacctctacaagcaaatctccaacagcacatctggaggatcttcaaatgacaacgcctacttcggctacagcaccccctgggggtattttgacttcaacagattccactgccacttctcaccacgtgactggcagcgactcatcaacaacaactggggattccggcctaagcgactcaacttcaagctcttcaacattcaggtcaaagaggttacggacaacaatggagtcaagaccatcgccaataaccttaccagcacggtccaggtcttcacggactcagactatcagctcccgtacgtgctcgggtcggctcacgagggctgcctcccgccgttcccagcggacgttttcatgattcctcagtacgggtatctgacgcttaatgatggaagccaggccgtgggtcgttcgtccttttactgcctggaatatttcccgtcgcaaatgctaagaacgggtaacaacttccagttcagctacgagtttgagaacgtacctttccatagcagctacgctcacagccaaagcctggaccgactaatgaatccactcatcgaccaatacttgtactatctctcaaagactattaacggttctggacagaatcaacaaacgctaaaattcagtgtggccggacccagcaacatggctgtccagggaagaaactacatacctggacccagctaccgacaacaacgtgtctcaaccactgtgactcaaaacaacaacagcgaatttgcttggcctagagcttcttcttgggctctcaatggacgtaatagcttgatgaatcctggacctgctatggccagccacaaagaaggagaggaccgtttctttcctttgtctggatctttaatttttggcaaacaaggaactggaagagacaacgtggatgcggacaaagtcatgataaccaacgaagaagaaattaaaactactaacccggtagcaacggagtcctatggacaagtggccacaaaccaccagagtgcccaagcacaggcgcagaccggctgggttcaaaaccaaggaatacttccgggtatggtttggcaggacagagatgtgtacctgcaaggacccatttgggccaaaattcctcacacggacggcaactttcacccttctccgctgatgggagggtttggaatgaagcacccgcctcctcagatcctcatcaaaaacacacctgtacctgcggatcctccaacggccttcaacaaggacaagctgaactctttcatcacccagtattctactggccaagtcagcgtggagatcgagtgggagctgcagaaggaaaacagcaagcgctggaacccggagatccagtacacttccaactattacaagtctaataatgttgaatttgctgttaatactgaaggtgtatatagtgaaccccgccccattggcaccagatacctgactcgtaatctgtaattgcttgttaatcaataaaccgtttaattcgtttcagttgaactgcggcc

SEQ ID NO: 2970 - DNA, 2601 bp, Artificial Sequence
  Synthetic polynucleotide
ccatcgacgtcagacgcggaagcttcgatcaactacgcggacaggtaccaaaacaaatgttctcgtcacgtgggcatgaatctgatgctgtttccctgcagacaatgcgagagactgaatcagaattcaaatatctgcttcactcacggtgtcaaagactgtttagagtgctttcccgtgtcagaatctcaacccgtttctgtcgtcaaaaaggcgtatcagaaactgtgctacattcatcacatcatgggaaaggtgccagacgcttgcactgcttgcgacctggtcaatgtggacttggatgactgtgtttctgaacaataaatgacttaaaccaggtatggctgccgatggttatcttccagattggctcgaggacaaccttagtgaaggaattcgcgagtggtgggctttgaaacctggagcccctcaacccaaggcaaatcaacaacatcaagacaacgctcgaggtcttgtgcttccgggttacaaataccttggacccggcaacggactcgacaagggggagccggtcaacgcagcagacgcggcggccctcgagcacgacaaggcctacgaccagcagctcaaggccggagacaacccgtacctcaagtacaaccacgccgacgccgagttccaggagcggctcaaagaagatacgtcttttgggggcaacctcgggcgagcagtcttccaggccaaaaagaggcttcttgaacctcttggtctggttgaggaagcggctaagacggctcctggaaagaagaggcctgtagagcagtctcctcaggaaccggactcctccgcgggtattggcaaatcgggtgcacagcccgctaaaaagagactcaatttcggtcagactggcgacacagagtcagtcccagaccctcaaccaatcggagaacctcccgcagccccctcaggtgtgggatctcttacaatggcttcaggtggtggcgcaccagtggcagacaataacgaaggtgccgatggagtgggtagttcctcgggaaattggcattgcgattcccaatggctgggggacagagtcatcaccaccagcacccgaacctgggccctgcccacctacaacaatcacctctacaagcaaatctccaacagcacatctggaggatcttcaaatgacaacgcctacttcggctacagcaccccctgggggtattttgacttcaacagattccactgccacttctcaccacgtgactggcagcgactcatcaacaacaactggggattccggcctaagcgactcaacttcaagctcttcaacattcaggtcaaagaggttacggacaacaatggagtcaagaccatcgccaataaccttaccagcacggtccaggtcttcacggactcagactatcagctcccgtacgtgctcgggtcggctcacgagggctgcctcccgccgttcccagcggacgttttcatgattcctcagtacgggtatctgacgcttaatgatggaagccaggccgtgggtcgttcgtccttttactgcctggaatatttcccgtcgcaaatgctaagaacgggtaacaacttccagttcagctacgagtttgagaacgtacctttccatagcagctacgctcacagccaaagcctggaccgactaatgaatccactcatcgaccaatacttgtactatctctcaaagactattaacggttctggacagaatcaacaaacgctaaaattcagtgtggccggacccagcaacatggctgtccagggaagaaactacatacctggacccagctaccgacaacaacgtgtctcaaccactgtgactcaaaacaacaacagcgaatttgcttggcctagagcttcttcttgggctctcaatggacgtaatagcttgatgaatcctggacctgctatggccagccacaaagaaggagaggaccgtttctttcctttgtctggatctttaatttttggcaaacaaggaactggaagagacaacgtggatgcggacaaagtcatgataaccaacgaagaagaaattaaaactactaacccggtagcaacggagtcctatggacaagtggccacaaaccaccagagtgcccaagcacaggcgcagaccggctgggttcaaaaccaaggaatacttccgggtatggtttggcaggacagagatgtgtacctgcaaggacccatttgggccaaaattcctcacacggacggcaactttcacccttctccgctgatgggagggtttggaatgaagcacccgcctcctcagatcctcatcaaaaacacacctgtacctgcggatcctccaacggccttcaacaaggacaagctgaactctttcatcacccagtattctactggccaagtcagcgtggagatcgagtgggagcggcagaaggaaaacagcaagcgctggaacccggagatccagtacacttccaactattacaagtctaataatgttgaatttgctgttaatactgaaggtgtatatagtgaaccccgccccattggcaccagatacctgactcgtaatctgtaattgcttgttaatcaataaaccgtttaattcgtttcagttgaactgcggcc

SEQ ID NO: 2971 - DNA, 2601 bp, Artificial Sequence
  Synthetic polynucleotide
ccatcgacgtcagacgcggaagcttcgatcaactacgcggacaggtaccaaaacaaatgttctcgtcacgtgggcatgaatctgatgctgtttccctgcagacaatgcgagagactgaatcagaattcaaatatctgcttcactcacggtgtcaaagactgtttagagtgctttcccgtgtcagaatctcaacccgtttctgtcgtcaaaaaggcgtatcagaaactgtgctacattcatcacatcatgggaaaggtgccagacgcttgcactgcttgcgacctggtcaatgtggacttggatgactgtgtttctgaacaataaatgacttaaaccaggtatggctgccgatggttatcttccagattggctcgaggacaaccttagtgaaggaattcgcgagtggtgggctttgaaacctggagcccctcaacccaaggcaaatcaacaacatcaagacaacgctcgaggtcttgtgcttccgggttacaaataccttggacccggcaacggactcgacaagggggagccggtcaacgcagcagacgcggcggccctcgagcacgacaaggcctacgaccagcagctcaaggccggagacaacccgtacctcaagtacaaccacgccgacgccgagttccaggagcggctcaaagaagatacgtcttttgggggcaacctcgggcgagcagtcttccaggccaaaaagaggcttcttgaacctcttggtctggttgaggaagcggctaagacggctcctggaaagaagaggcctgtagagcagtctcctcaggaaccggactcctccgcgggtattggcaaatcgggtgcacagcccgctaaaaagagactcaatttcggtcagactggcgacacagagtcagtcccagaccctcaaccaatcggagaacctcccgcagccccctcaggtgtgggatctcttacaatggcttcaggtggtggcgcaccagtggcagacaataacgaaggtgccgatggagtgggtagttcctcgggaaattggcattgcgattcccaatggctgggggacagagtcatcaccaccagcacccgaacctgggccctgcccacctacaacaatcacctctacaagcaaatctccaacagcacatctggaggatcttcaaatgacaacgcctacttcggctacagcaccccctgggggtattttgacttcaacagattccactgccacttctcaccacgtgactggcagcgactcatcaacaacaactggggattccggcctaagcgactcaacttcaagctcttcaacattcaggtcaaagaggttacggacaacaatggagtcaagaccatcgccaataaccttaccagcacggtccaggtcttcgcggactcagactatcagctcccgtacgtgctcgggtcggctcacgagggctgcctcccgccgttcccagcggacgttttcatgattcctcagtacgggtatctgacgcttaatgatggaagccaggccgtgggtcgttcgtccttttactgcctggaatatttcccgtcgcaaatgctaagaacgggtaacaacttccagttcagctacgagtttgagaacgtacctttccatagcagctacgctcacagccaaagcctggaccgactaatgaatccactcatcgaccaatacttgtactatctctcaaagactattaacggttctggacagaatcaacaaacgctaaaattcagtgtggccggacccagcaacatggctgtccagggaagaaactacatacctggacccagctaccgacaacaacgtgtctcaaccactgtgactcaaaacaacaacagcgaatttgcttggcctagagcttcttcttgggctctcaatggacgtaatagcttgatgaatcctggacctgctatggccagccacaaagaaggagaggaccgtttctttcctttgtctggatctttaatttttggcaaacaaggaactggaagagacaacgtggatgcggacaaagtcatgataaccaacgaagaagaaattaaaactactaacccggtagcaacggagtcctatggacaagtggccacaaaccaccagagtgcccaagcacaggcgcagaccggctgggttcaaaaccaaggaatacttccgggtatggtttggcaggacagagatgtgtacctgcaaggacccatttgggccaaaattcctcacacggacggcaactttcacccttctccgctgatgggagggtttggaatgaagcacccgcctcctcagatcctcatcaaaaacacacctgtacctgcggatcctccaacggccttcaacaaggacaagctgaactctttcatcacccagtattctactggccaagtcagcgtggagatcgagtgggagctgcagaaggaaaacagcaagcgctggaacccggagatccagtacacttccaactattacaagtctaataatgttgaatttgctgttaatactgaaggtgtatatagtgaaccccgccccattggcaccagatacctgactcgtaatctgtaattgcttgttaatcaataaaccgtttaattcgtttcagttgaactgcggcc

SEQ ID NO: 2972 - DNA, 2601 bp, Artificial Sequence
  Synthetic polynucleotide
ccatcgacgtcagacgcggaagcttcgatcaactacgcggacaggtaccaaaacaaatgttctcgtcacgtgggcatgaatctgatgctgtttccctgcagacaatgcgagagactgaatcagaattcaaatatctgcttcactcacggtgtcaaagactgtttagagtgctttcccgtgtcagaatctcaacccgtttctgtcgtcaaaaaggcgtatcagaaactgtgctacattcatcacatcatgggaaaggtgccagacgcttgcactgcttgcgacctggtcaatgtggacttggatgactgtgtttctgaacaataaatgacttaaaccaggtatggctgccgatggttatcttccagattggctcgaggacaaccttagtgaaggaattcgcgagtggtgggctttgaaacctggagcccctcaacccaaggcaaatcaacaacatcaagacaacgctcgaggtcttgtgcttccgggttacaaataccttggacccggcaacggactcgacaagggggagccggtcaacgcagcagacgcggcggccctcgagcacgacaaggcctacgaccagcagctcaaggccggagacaacccgtacctcaagtacaaccacgccgacgccgagttccaggagcggctcaaagaagatacgtcttttgggggcaacctcgggcgagcagtcttccaggccaaaaagaggcttcttgaacctcttggtctggttgaggaagcggctaagacggctcctggaaagaagaggcctgtagagcagtctcctcaggaaccggactcctccgcgggtattggcaaatcgggtgcacagcccgctaaaaagagactcaatttcggtcagactggcgacacagagtcagtcccagaccctcaaccaatcggagaacctcccgcagccccctcaggtgtgggatctcttacaatggcttcaggtggtggcgcaccagtggcagacaataacgaaggtgccgatggagtgggtagttcctcgggaaattggcattgcgattcccaatggctgggggacagagtcatcaccaccagcacccgaacctgggccctgcccacctacaacaatcacctctacaagcaaatctccaacagcacatctggaggatcttcaaatgacaacgcctacttcggctacagcaccccctgggggtattttgacttcaacagattccactgccacttctcaccacgtgactggcagcgactcatcaacaacaactggggattccggcctaagcgactcaacttcaagctcttcaacattcaggtcaaagaggttacggacaacaatggagtcaagaccatcgccaataaccttaccagcacggtccaggtcttcacggactcagactatcagctcccgtacgtgctcgggtcggctcacgagggctgcctcccgccgttcccagcggacgttttcatgattcctcagtacgggtatctgacgcttaatgatggaagccaggccgtgggtcgttcgtccttttactgcctggaatatttcccgtcgcaaatgctaagaacgggtaacaacttccagttcagctacgagtttgagaacgtacctttccatagcagctacgctcacagccaaagcctggaccgactaatgaatccactcatcgaccaatacttgtactatctctcaaagactattaacggttctggacagaatcaacaaacgctaaaattcagtgtggccggacccagcaacatggctgtccagggaagaaactacatacctggacccagctaccgacaacaacgtgtctcaaccactgtgactcaaaacaacaacagcgaaattgcttggcctagagcttcttcttgggctctcaatggacgtaatagcttgatgaatcctggacctgctatggccagccacaaagaaggagaggaccgtttctttcctttgtctggatctttaatttttggcaaacaaggaactggaagagacaacgtggatgcggacaaagtcatgataaccaacgaagaagaaattaaaactactaacccagtagcaacggagtcctatggacaagtggccacaaaccaccagagtgcccaagcacaggcgcagaccggctgggttcaaaaccaaggaatacttccgggtatggtttggcaggacagagatgtgtacctgcaaggacccatttgggccaaaattcctcacacggacggcaactttcacccttctccgctgatgggagggtttggaatgaagcacccgcctcctcagatcctcatcaaaaacacacctgtacctgcggatcctccaacggccttcaacaaggacaagctgaactctttcatcacccagtattctactggccaagtcagcgtggagatcgagtgggagctgcagaaggaaaacagcaagcgctggaacccggagatccagtacacttccaactattgcaagtctaataatgttgaatttgctgttaatactgaaggtgtatatagtgaaccccgccccattggcaccagatacctgactcgtaatctgtaattgcttgttaatcaataaaccgtttaattcgtttcagttgaactgcggcc

SEQ ID NO: 2973 - DNA, 2601 bp, Artificial Sequence
  Synthetic polynucleotide
ccatcgacgtcagacgcggaagcttcgatcaactacgcggacaggtaccaaaacaaatgttctcgtcacgtgggcatgaatctgatgctgtttccctgcagacaatgcgagagactgaatcagaattcaaatatctgcttcactcacggtgtcaaagactgtttagagtgctttcccgtgtcagaatctcaacccgtttctgtcgtcaaaaaggcgtatcagaaactgtgctacattcatcacatcatgggaaaggtgccagacgcttgcactgcttgcgacctggtcaatgtggacttggatgtctgtgtttctgaacaataaatgacttaaaccaggtatggctgccgatggttatcttccagattggctcgaggacaaccttagtgaaggaattcgcgagtggtgggctttgaaacctggagcccctcaacccaaggcaaatcaacaacatcaagacaacgctcgaggtcttgtgcttccgggttacaaataccttggacccggcaacggactcgataagggggagccggtcaacgcagcagacgcggcggccctcgagcacgacaaggcctacgaccagcagctcaaggccggagacaacccgtacctcaagtacaaccacgccgacgccgagttccaggagcggctcaaagaagatacgtcttttgggggcaacctcgggcgagcagtcttccaggccaaaaagaggcttcttgaacctcttggtctggttgaggaagcggctaagacggctcctggaaagaagaggcctgtagagcagtctcctcaggaaccggactcctccgcgggtattggcaaatcgggtgcacagcccgctaaaaagagactcaatttcggtcagactggcgacacagagtcagtcccagaccctcaaccaatcggagaacctcccgcagccccctcaggtgtgggatctcttacaatggcttcaggtggtggcgcaccagtggcagacaataacgaaggtgccgatggagtgggtagttcctcgggaaattggcattgcgattcccaatggctgggggacagagtcatcaccaccagcacccgaacctgggccctgcccacctacaacaatcacctctacaagcaaatctccaacagcacatctggaggatcttcaaatgacaacgcctacttcggctacagcaccccctgggggtattttgacttcaacagattccactgccacttctcaccacgtgactggcagcgactcatcaacaacaactggggattccggcctaagcgactcaacttcaagctcttcaacattcaggtcaaagaggttacggacaacaatggagtcaagaccatcgccaataaccttaccagcacggtccaggtcttcacggactcagactatcagctcccgtacgtgctcgggtcggctcacgagggctgcctcccgccgttcccagcggacgttttcatgattcctcagtacgggtatctgacgcttaatgatggaagccaggccgtgggtcgttcgtccttttactgcctggaatatttcccgtcgcaaatgctaagaacgggtaacaacttccagttcagctacgagtttgagaacgtacctttccatagcagctacgctcacagccaaagcctggaccgactaatgaatccactcatcgaccaatacttgtactatctctcaaagactattaacggttctggacagaatcaacaaacgctaaaattcagtgtggccggacccagcaacatggctgtccagggaagaaactacatacctggacccagctaccgacaacaacgtgtctcaaccactgtgactcaaaacaacaacagcgaatttgcttggcctagagcttcttcttgggctctcaatggacgtaatagcttgatgaatcctggacctgctatggccagccacaaagaaggagaggaccgtttctttcctttgtctggatctttaatttttggcaaacaaggaactggaagagacaacgtggatgcggacaaagtcatgataaccaacgaagaagaaattaaaactactaacccggtagcaacggagtcctatggacaagtggccacaaaccaccagagtgcccaagcacaggcgcagaccggctgggttcaaaaccaaggaatacttccgggtatggtttggcaggacagagatgtgtacctgcaaggacccatttgggccaaaattcctcacacggacggcaactttcacccttctccgctgatgggagggtttggaatgaagcacccgcctcctcagatcctcatcaaaaacacacctgtacctgcggatcctccaacggccttcaacaaggacaagctgaactctttcatcacccagtattctactggccaagtcagcgtggagatcgagtgggagctgcagaaggaaaacagcaagcgctggaacccggagatccagtacacttccaactattacaagtctaataatgttgaatttgctgttaatactgaaggtgtatatagtgaaccccgccccattggcaccagatacctgactcgtaatctgtaattgcttgttaatcaataaaccgtttaattcgtttcagttgaactgcggcc

SEQ ID NO: 2974 - protein, 736 aa, Artificial Sequence
  Synthetic polypeptide
MTADGYLPDWLEDNLSEGIREWWALKPGAPQPKANQQHQDNARGLVLPGYKYLGPGNGLDKGEPVNAADAAALEHDKAYDQQLKAGDNPYLKYNHADAEFQERLKEDTSFGGNLGRAVFQAKKRLLEPLGLVEEAAKTAPGKKRPVEQSPQEPDSSAGIGKSGAQPAKKRLNFGQTGDTESVPDPQPIGEPPAAPSGVGSLTMASGGGAPVADNNEGADGVGSSSGNWHCDSQWLGDRVITTSTRTWALPTYNNHLYKQISNSTSGGSSNDNAYFGYSTPWGYFDFNRFHCHFSPRDWQRLINNNWGFRPKQLNFKLFNIQVKEVTDNNGVKTIANNLTSTVQVFTDSDYQLPYVLGSAHEGCLPPFPADVFMIPQYGYLTLNDGSQAVGRSSFYCLEYFPSQMLRTGNNFQFSYEFENVPFHSSYAHSQSLDRLMNPLIDQYLYYLSKTINGSGQNQQTLKFSVAGPSNMAVQGRNYIPGPSYRQQRVSTTVTQNNNSEFAWPGASSWALNGRNSLMNPGPAMASHKEGEDRFFPLSGSLIFGKQGTGRDNVDADKVMITNEEEIKTTNPVATESYGQVATNHQSAQAQAQTGWVQNQGILPGMVWQDRDVYLQGPIWAKIPHTDGNFHPSPLMGGFGMKHPPPQILIKNTPVPADPPTAFNKDKLNSFITQYSTGQVSVEIEWELQKENSKRWNPEIQYTSNYYKSNNVEFAVNTEGVYSEPRPIGTRYLTRNL

SEQ ID NO: 2975 - protein, 736 aa, Artificial Sequence
  Synthetic polypeptide
MAADGYLPDWLEDNLSEGIREWWALKPGAPQPKANQQHQDNARGLVLPGYKYLGPGNGLDKGEPVNAADAAALEHDKAYDQQLKAGDNPYLKYNHADAEFQERLKEDTSFGGNLGRAVFQAKKRLLEPLGLVEEAAKTAPGKKRPVEQSPQEPDSSAGIGKSGAQPAKKRLNFGQTGDTESVPDPQPIGEPPAAPSGVGSLTMASGGGAPVADNNEGADGVGSSSGNWHCDSQWLGDRVITTSTRTWALPTYNNHLYKQISNSTSGGSSNDNAYFGYSTPWGYFDFNRFHCHFSPRDWQRLINNNWGFRPKRLNFKLFNIQVKEVTDNNGVKTIANNLTSTVQVFTDSDYQLPYVLGSAHEGCLPPFPADVFMIPQYGYLTLNDGSQAVGRSSFYCLEYFPSQMLRTGNNFQFSYEFENVPFHSSYAHSQSLDRLMNPLIDQYLYYLSKTINGSGQNQQTLKFSVAGPSNMAVQGRNYIPGPSYRQQRVSTTVTQNNNSEFAWPGASSWALNGRNSLMNPGPAMASHKEGEDRFFPLSGSLIFGKQGTGRDNVDADKVMITNEEEIKTTNPVATESYGQVATNHQSAQAQAQTGWVQNQGILPGMVWQDRDVYLQGPIWAKIPHTGGNFHPSPLMGGFGMKHPPPQILIKNTPVPADPPTAFNKDKLNSFITQYSTGQVSVEIEWELQKENSKRWNPEIQYTSNYYKSNNVEFAVNTGGVYSEPRPIGTRYLTRNL

SEQ ID NO: 2976 - protein, 736 aa, Artificial Sequence
  Synthetic polypeptide
MAADGYLPDWLEDNLSEGIREWWALKPGAPQPKANQQHQDNARGLVLPGYKYLGPGNGLDKGEPVNAADAAALEHDKAYDQQLKAGDNPYLKYNHADAEFQERLKEDTSFGGNLGRAVFQAKKRLLEPLGLVEEAAKTAPGKKRPVEQSPQEPDSSAGIDKSGAQPAKKRLNFGQTGDTESVPDPQPIGEPPAAPSGVGSLTMASGGGAPVADNNEGADGVGSSSGNWHCDSQWLGDRVITTSTRTWALPTYNNHLYKQISNSTSGGSSNDNAYFGYSTPWGYFDFNRFHCHFSPRDWQRLINNNWGFRPKRLNFKLFNIQVKEVTDNNGVKTIANNLTSTVQVFTDSDYQLPYVLGSAHEGCLPPFPADVFMIPQYGYLTLNDGSQAVGRSSFYCLEYFPSQMLRTGNNFQFSYEFENVPFHSSYAHSQSLDRLMNPLIDQYLYYLSKTINGSGQNQQTLKFSVAGPSNMAVQGRNYIPGPSYRQQRVSTTVTQNNNSEFAWPGASSWALNGRNSLMNPGPAMASHKEGEDRFFPLSGSLIFGKQGTGRDNVDADKVMITNEEEIKTTNPVATESYGQVATNHQSAQAQAQTGWVQNQGILPGMVWQDRDVYLQGPIWAKIPHTDGNFHPSPLMGGFGMKHPPPQILIKNTPVPADPPTAFNKDKLNSFITQYSTGQVSVEIEWELQKENSKRWNPEIQYTSNYYKSNNVEFAVNTEGVYSEPRPIGTRYLTRNL

SEQ ID NO: 2977 - protein, 736 aa, Artificial Sequence
  Synthetic polypeptide
MAADGYLPDWLEDNLSEGIREWWALKPGAPQPKANQQHQDNARGLVLPGYKYLGPGNGLDKGEPVNAADAAALEHDKAYDQQLKAGDNPYLKYNHADAEFQERLKEDTSFGGNLGRAVLQAKKRLLEPLGLVEEAAKTAPGKKRPVEQSPQEPDSSAGIGKSGAQPAKKRLNFGQTGDTESVPDPQPIGEPPAAPSGVGSLTMASGGGAPVADNNEGADGVGSSSGNWHCDSQWLGDRVITTSTRTWALPTYNNHLYKQISNSTSGGSSNDNAYFGYSTPWGYFDFNRFHCHFSPRDWQRLINNNWGFRPKRLNFKLFNIQVKEVTDNNGVKTIANNLTSTVQVFTDSDYQLPYVLGSAHEGCLPPFPADVFMIPQYGYLTLNDGSQAVGRSSFYCLEYFPSQMLRTGNNFQFSYEFENVPFHSSYAHSQSLDRLMNPLIDQYLYYLSKTINGSGQNQQTLKFSVAGSSNMAVQGRNYIPGPSYRQQRVSTTVTQNNNSEFAWPGASSWALNGRNSLMNPGPAMASHKEGEDRFFPLSGSLIFGKQGTGRDNVDADKVMITNEEEIKTTNPVATESYGQVATNHQSAQAQAQTGWVQNQGILPGMVWQDRDVYLQGPIWAKIPHTDGNFHPSPLMGGFGMKHPPPQILIKNTPVPADPPTAFNKDKLNSFITQYSTGQVSVEIEWELQKENSKRWNPEIQYTSNYYKSNNVEFAVNTEGVYSEPRPIGTRYLTRNL

SEQ ID NO: 2978 - protein, 736 aa, Artificial Sequence
  Synthetic polypeptide
MAADGYLPDWLEDNLSEGIREWWALKPGAPQPKANQQHQDNARGLVLPGYKYLGPGNGLDKGEPVNAADAAALEHDRAYDQQLKAGDNPYLKYNHADAEFQERLKEDTSFGGNLGRAVFQAKKRLLEPLGLVEEAAKTAPGKKRPVEQSPQEPDSSAGIGKSGAQPAKKRLNFGQTGDTESVPDPQPIGEPPAAPSGVGSLTMASGGGAPVADNNEGADGVGSSSGNWHCDSQWLGDRVITTSTRTWALPTYNNHLYKQISNSTSGGSSNDNAYFGYSTPWGYFDFNRFHCHFSPRDWQRLINNNWGFRPKRLNFKLFNIQVKEVTDNNGVKTIANNLTSTVQVFTDSDYQLPYVLGSAHEGCLPPFPADVFMIPQYGYLTLNDGSQAVGRSSFYCLEYFPSQMLRTGNNFQFSYEFENVPFHSSYAHSQSLDRLMNPLIDQYLYYLSKTINGSGQNQQTLKFSVAGPSNMAVQGRNYIPGPSYRQQRVSTTVTQNNNSEFAWPGASSWALNGRNSLMNPGPAMASHKEGEDRFFPLSGSLIFGKQGTGRDNVDADKVMITNEEEIKTTNPVATESYGQVATNHQSAQAQAQTGWVQNQGILPGMVWQDRDVYLQGPIWAKIPHTDGNFHPSPLMGGFGMKHPPPQILIKNTPVPADPPTAFNKDKLNSFITQYSTGQVSVEIEWELQKKNSKRWNPEIQYTSNYYKSNNVEFAVNTEGVYSEPRPIGTRYLTRNL

SEQ ID NO: 2979 - protein, 736 aa, Artificial Sequence
  Synthetic polypeptide
MAADGYLPDWLEDNLSEGIREWWALKPGAPQPKANQQHQDNARGLVLPGYKYLGPGNGLDKGEPVNAADAAALEHDKAYDQQLKAGDNPYLKYNHADAEFQERLKEDTSFGGNLGRAVFQAKKRLLEPLGLVEEAAKTAPGKKRPVEQSPQEPDSSAGIGKSGAQPAKKRLNFGQTGDTESVPDPQPIGEPPAAPSGVGSLTMASGGGAPVADNNEGADGVGSSSGNWHCDSQWLGDRVITTSTRTWALPTYNNHLYKQISNSTSGGSSNDNAYFGYSTPWGYFDFNRFHCHFSPRDWQRLINNNWGFRPKRLNFKLFNIQVKEVTDNNGVKTIANNLTSTVQVFTDSDYQLPYVLGSAHEGCLPPFPADVFMIPQYGYLTLNDGSQAVGRSSFYCLEYFPSQMLRTGNNFQFSYEFENVPFHSSYAHSQSLDRLMNPLIDQYLYYLSKTINGSGQNQQTLKFSVAGPSNMAVQGRNYIPGPSYRQQRVSTTVTQNNNSEFAWPGASSWALNGRNSLMNPGPAMASHKEGEDRFFPLSGSLIFGKQGTGRDNVDADKVMITNEEEIKTTNPVATESYGQVATNHQSAQARAQTGWVQNQGILPGMVWQDRDVYLQGPIWAKIPHTDGNFHPSPLMGGFGMKHPPPQILIKNTPVPADPPTAFNKDKLNSFITQYSTGQVSVEIEWELQKENSKRWNPEIQYTSNYYKSNNVEFAVNTEGVYSEPRPIGTRYLTRNL

SEQ ID NO: 2980 - protein, 736 aa, Artificial Sequence
  Synthetic polypeptide
MAADGYLPDWLEDNLSEGIREWWALKPGAPQPKANQQHQDNARGLVLPGYKYLGPGNGLDKGEPVNAVDAAALEHDKAYDQQLKAGDNPYLKYNHADAEFQERLKEDTSFGGNLGRAVFQAKKRLLEPLGLVEEAAKTAPGKKRPVEQSPQEPDSSAGIGKSGAQPAKKRLNFGQTGDTESVPDPQPIGEPPAAPSGVGSLTMASGGGAPVADNNEGADGVGSSSGNWHCDSQWLGDRVITTSTRTWALPTYNNHLYKQISNSTSGGSSNDNAYFGYSTPWGYFDFNRFHCHFSPRDWQRLINNNWGFRPKRLNFKLFNIQVKEVTDNNGVKTIANNLTSTVQVFTDSDYQLPYVLGSAHEGCLPPFPADVFMIPQYGYLTLNDGSQAVGRSSFYCLEYFPSQMLRTGNNFQFSYEFENVPFHSSYAHSQSLDRLMNPLIDQYLYYLSKTINGSGQNQQTLKFSVAGPSNMAVQGRNYIPGPSYRQQRVSTTVTQNNNSEFAWPGASSWALNGRNSLMNPGPAMASHKEGEDRFFPLSGSLIFGKQGTGRDNVDADKVMITNEEEIKTTNPVATESYGQVATNHQSAQAQAQTGWVQNQGILPGMVWQDRDVYLQGPIWAKIPHTDGNFHPSPLMGGFGMKHPPPQILIKNTPVPADPPTAFNKDKLNSFITQYSTGQVSVEIEWELQKENSKRWNPEIQYTSNYYKSNNVEFAVNTEGVYSEPRPIGTRYLTRNL

SEQ ID NO: 2981 - protein, 736 aa, Artificial Sequence
  Synthetic polypeptide
MAADGYLPDWLEDNLSEGIREWWALKPGAPQPKANQQHQDNARGLVLPGYKYLGPGNGLDKGEPVNAADAAALEHDKAYDQQLKAGDNPYLKYNHADAEFQERLKEDTSFGGNLGRAVFQAKKRLLEPLGLVEEAAKTAPGKKRPVEQSPREPDSSAGIGKSGAQPAKKRLNFGQTGDTESVPDPQPIGEPPAAPSGVGSLTMASGGGAPVADNNEGADGVGSSSGNWHCDSQWLGDRVITTSTRTWALPTYNNHLYKQISNSTSGGSSNDNAYFGYSTPWGYFDFNRFHCHFSPRDWQRLINNNWGFRPKRLNFKLFNIQVKEVTDNNGVKTIANNLTSTVQVFTDSDYQLPYVLGSAHEGCLPPFPADVFMIPQYGYLTLNDGSQAVGRSSFYCLEYFPSQMLRTGNNFQFSYEFENVPFHSSYAHSQSLDRLMNPLIDQYLYYLSKTINGSGQNQQTLKFSVAGPSNMAVQGRNYIPGPSYRQQRVSTTVTQNNNSEFAWPGASSWALNGRNSLMNPGPAMASHKEGEDRFFPLSGSLIFGKQGTGRDNVDADKVMITNEEEIKTTNPVATESYGQVATNHQSAQAQAQTGWVQNQGILPGMVWQDRDVYLQGPIWAKIPHTDGNFHPSPLMGGFGMKHPPPQILIKNTPVPADPPTAFNKDKLNSFITQYSTGQVSVEIEWELQKENSKRWNPEIQYTSNYYKSNNVEFAVNTEGVYSEPRPIGTRYLTRNL

SEQ ID NO: 2982 - protein, 736 aa, Artificial Sequence
  Synthetic polypeptide
MAADGYLPDWLEDNLSEGIREWWALKPGAPQPKANQQHQDNARGLVLPGYKYLGPGNGLDKGEPVNAADAAALEHDKAYDQQLKAGDNPYLKYNHADAEFQERLKEDTSFGGNLGRAVFQAKKRLLEPLGLVEEAAKTAPGKKRPVEQSPQEPDSSAGIGKSGAQPAKKRLNFGQTGDTESVPDPQPIGEPPAAPSGVGSLTMASCGGAPVADNNEGADGVGSSSGNWHCDSQWLGDRVITTSTRTWALPTYNNHLYKQISNSTSGGSSNDNAYFGYSTPWGYFDFNRFHCHFSPRDWQRLINNNWGFRPKRLNFKLFNIQVKEVTDNNGVKTIANNLTSTVQVFTDSDYQLPYVLGSAHEGCLPPFPADVFMIPQYGYLTLNDGSQAVGRSSFYCLEYFPSQMLRTGNNFQFSYEFENVPFHSSYAHSQSLDRLMNPLIDQYLYYLSKTINGSGQNQQTLKFSVAGPSNMAVQGRNYIPGPSYRQQRVSTTVTQNNNSEFAWPGASSWALNGRNSLMNPGPAMASHKEGEDRFFPLSGSLIFGKQGTGRDNVDADKVMITNEEEIKTTNPVATESYGQVATNHQSAQAQAQTGWVQNQGILPGMVWQDRDVYLQGPIWAKIPHTDGNFHPSPLMGGFGMKHPPPQILIKNTPVPADPPTAFNKDKLNSFITQYSTGQVSVEIEWELQKENSKRWNPEIQYTSNYYKSNNVEFAVNTEGVYSEPRPIGTRYLTRNL

SEQ ID NO: 2983 - protein, 736 aa, Artificial Sequence
  Synthetic polypeptide
MAADGYLPDWLEDNLSEGIREWWALKPGAPQPKANQQHQDNARGLVLPGYKYLGPGNGLDKGEPINAADAAALEHDKAYDQQLKAGDNPYLKYNHADAEFQERLKEDTSFGGNLGRAVFQAKKRLLEPLGLVEEAAKTAPGKKRPVEQSPQEPDSSAGIGKSGAQPAKKRLNFGQTGDTESVPDPQPIGEPPAAPSGVGSLTMASGGGAPVADNNEGADGVGSSSGNWHCDSQWLGDRVITTSTRTWALPTYNNHLYKQISNSTSGGSSNDNAYFGYSTPWGYFDFNRFHCHFSPRDWQRLINNNWGFRPKRLNFKLFNIQVKEVTDNNGVKTIANNLTSTVQVFTDSDYQLPYVLGSAHEGCLPPFPADVFMIPQYGYLTLNDGSQAVGRSSFYCLEYFPSQMLRTGNNFQFSYEFENVPFHSSYAHSQSLDRLMNPLIDQYLYYLSKTINGSGQNQQTLKFSVAGPSNMAVQGRNYIPGPSYRQQRVSTTVTQNNNSEFAWPGASSWALNGRNSLMNPGPAMASHKEGEDRFFPLSGSLIFGKQGTGRDNVDADKVMITNEEEIKTTNPVATESYGQVATNHQSAQAQAQTGWVQNQGILPGMVWQDRDVYLQGPIWAKIPHTYGNFHPSPLMGGFGMKHPPPQILIKNTPVPADPPTAFNKDKLNSFITQYSTGQVSVEIEWELQKENSKRWNPEIQYTSNYYKSNNVEFAVNTEGVYSEPRPIGTRYLTRNL

SEQ ID NO: 2984 - protein, 736 aa, Artificial Sequence
  Synthetic polypeptide
MAADGYLPDWLEDNLSEGIREWWALKPGAPQPKANQQHQDNARGLVLPGYKYLGPGNGLDKGEPVNAADAAALEHDKAYDQQLKAGDNPYLKYNHADAEFQERLKEDTSFGGNLGRAVFQAKKRLLEPLGLVEEAAKTAPGKKRPVEQSPQEPDSSAGIGKSGAQPAKKRLNFGQTGDTESVPDPQPIGEPPAAPSGVGSLTMASGGGAPVADNNEGADGVGSSSGNWHCDSQWLGDRVITTSTRTWALPTYNNHLYKQISNSTSGGSSNDNAYFGYSTPWGYFDFNRFHCHFSPHDWQRLINNNWGFRPKRLNFKLFNIQVKEVTDNNGVKTIANNLTSTVQVFTDSDYQLPYVLGSAHEGCLPPFPADVFMIPQYGYLTLNDGSQAVGRSSFYCLEYFPSQMLRTGNNFQFSYEFENVPFHSSYAHSQSLDRLMNPLIDQYLYYLSKTINGSGQNQQTLKFNVAGPSNMAVQGRNYIPGPSYRQQRVSTTVTQNNNSEFAWPRASSWALNGRNSLMNPGPAMASHKEGEDRFFPLSGSLIFGKQGTGRDNVDADKVMITNEEEIKTTNPVATESYGQVATNHQSAQAQAQTGWVQNQGILPGMVWQDRDVYLQGPIWAKIPHTDGNFHPSPLMGGFGMKHPPPQILIKNTPVPADPPTAFNKDKLNSFITQYSTGQVSMEIEWELQKENSKRWNPEIQYTSNYYKSNNVEFAVNTEGVYSEPRPIGTRYLTRNL

SEQ ID NO: 2985 - protein, 736 aa, Artificial Sequence
  Synthetic polypeptide
MAADGYLPDWLEDNLSEGIREWWALKPGAPQPKANQQHQDNARGLVLPGYKYLGPGNGLDKGEPVNAADAAALEHDKAYDQQLKAGDNPYLKYNHADAEFQERLKEDTSFGGNLGRAVFQAKKRLLEPLGLVEEAAKTAPGKKRPVEQSPQEPDSSAGIGKSGAQPAKKRLNFGQTGDTESVPDPQPIGEPPAAPSGVGSLTMASGGGAPVADNNEGADGVGSSSGNWHCDSQWLGDRVITTSTRTWALPTYNNHLYKQISNSTSGGSSNDNAYFGYSTPWGYFDFNRFHCHFSPRDWQRLINNNWGFRPKRLNFKLFNIQVKEVTDNNGVKTIANNLTSTVQVFTDSDYQLPYVLGSAHEGCLPPFPADVFMIPQYGYLTLNDGSQAVGRSSFYCLEYFPSQMLRTGNNFQFSYEFENVPFHSSYAHSQSLDRLMNPLIDQYLYYLSKTINGSGQNQQTLKFSVAGPSNMAVQGRNYIPGPSYRQQRVSTTVTQNNNSEFAWPRASSWALNGRNSLMNPGPAMASHKEGEDRFFPLSGSLIFGKQGTGRDNVDADKVMITNEEEIKTTNPVATESYGQVATNHQSAQAQAQTGWVQNQGILPGMVWQDRDVYLQGPIWAKIPHTDGNFHPSPLMGGFGMKHPPPQILIKNTPVPADPPTAFNKDKLNSFITQYSTGQVSVEIEWELQKENSKRWNPEIQYTSNYYKSNNVEFAVNTEGVYSEPRPIGTRYLTRNL

SEQ ID NO: 2986 - protein, 736 aa, Artificial Sequence
  Synthetic polypeptide
MAADGYLPDWLEDNLSEGIREWWALKPGAPQPKANQQHQDNARGLVLPGYKYLGPGNGLDKGEPVNAADAAALEHDKAYDQQLKAGDNPYLKYNHADAEFQERLKEDTSFGGNLGRAVFQAKKRLLEPLGLVEEAAKTAPGKKRPVEQSPQEPDSSAGIGKSGAQPAKKRLNFGQTGDTESVPDPQPIGEPPAAPSGVGSLTMASGGGAPVADNNEGADGVGSSSGNWHCDSQWLGDRVITTSTRTWALPTYNNHLYKQISNSTSGGSSNDNAYFGYSTPWGYFDFNRFHCHFSPRDWQRLINNNWGFRPKRLNFKLFNIQVKEVTDNNGVKTIANNLTSTVQVFTDSDYQLPYVLGSAHEGCLPPFPADVFMIPQYGYLTLNDGSQAVGRSSFYCLEYFPSQMLRTGNNFQFSYEFENVPFHSSYAHSQSLDRLMNPLIDQYLYYLSKTINGSGQNQQTLKFSVAGPSNMAVQGRNYIPGPSYRQQRVSTTVTQNNNSEFAWPRASSWALNGRNSLMNPGPAMASHKEGEDRFFPLSGSLIFGKQGTGRDNVDADKVMITNEEEIKTTNPVATESYGQVATNHQSAQAQAQTGWVQNQGILPGMVWQDRDVYLQGPIWAKIPHTDGNFHPSPLMGGFGMKHPPPQILIKNTPVPADPPTAFNKDKLNSFITQYSTGQVSVEIEWERQKENSKRWNPEIQYTSNYYKSNNVEFAVNTEGVYSEPRPIGTRYLTRNL

SEQ ID NO: 2987 - protein, 736 aa, Artificial Sequence
  Synthetic polypeptide
MAADGYLPDWLEDNLSEGIREWWALKPGAPQPKANQQHQDNARGLVLPGYKYLGPGNGLDKGEPVNAADAAALEHDKAYDQQLKAGDNPYLKYNHADAEFQERLKEDTSFGGNLGRAVFQAKKRLLEPLGLVEEAAKTAPGKKRPVEQSPQEPDSSAGIGKSGAQPAKKRLNFGQTGDTESVPDPQPIGEPPAAPSGVGSLTMASGGGAPVADNNEGADGVGSSSGNWHCDSQWLGDRVITTSTRTWALPTYNNHLYKQISNSTSGGSSNDNAYFGYSTPWGYFDFNRFHCHFSPRDWQRLINNNWGFRPKRLNFKLFNIQVKEVTDNNGVKTIANNLTSTVQVFADSDYQLPYVLGSAHEGCLPPFPADVFMIPQYGYLTLNDGSQAVGRSSFYCLEYFPSQMLRTGNNFQFSYEFENVPFHSSYAHSQSLDRLMNPLIDQYLYYLSKTINGSGQNQQTLKFSVAGPSNMAVQGRNYIPGPSYRQQRVSTTVTQNNNSEFAWPRASSWALNGRNSLMNPGPAMASHKEGEDRFFPLSGSLIFGKQGTGRDNVDADKVMITNEEEIKTTNPVATESYGQVATNHQSAQAQAQTGWVQNQGILPGMVWQDRDVYLQGPIWAKIPHTDGNFHPSPLMGGFGMKHPPPQILIKNTPVPADPPTAFNKDKLNSFITQYSTGQVSVEIEWELQKENSKRWNPEIQYTSNYYKSNNVEFAVNTEGVYSEPRPIGTRYLTRNL

SEQ ID NO: 2988 - protein, 736 aa, Artificial Sequence
  Synthetic polypeptide
MAADGYLPDWLEDNLSEGIREWWALKPGAPQPKANQQHQDNARGLVLPGYKYLGPGNGLDKGEPVNAADAAALEHDKAYDQQLKAGDNPYLKYNHADAEFQERLKEDTSFGGNLGRAVFQAKKRLLEPLGLVEEAAKTAPGKKRPVEQSPQEPDSSAGIGKSGAQPAKKRLNFGQTGDTESVPDPQPIGEPPAAPSGVGSLTMASGGGAPVADNNEGADGVGSSSGNWHCDSQWLGDRVITTSTRTWALPTYNNHLYKQISNSTSGGSSNDNAYFGYSTPWGYFDFNRFHCHFSPRDWQRLINNNWGFRPKRLNFKLFNIQVKEVTDNNGVKTIANNLTSTVQVFTDSDYQLPYVLGSAHEGCLPPFPADVFMIPQYGYLTLNDGSQAVGRSSFYCLEYFPSQMLRTGNNFQFSYEFENVPFHSSYAHSQSLDRLMNPLIDQYLYYLSKTINGSGQNQQTLKFSVAGPSNMAVQGRNYIPGPSYRQQRVSTTVTQNNNSEIAWPRASSWALNGRNSLMNPGPAMASHKEGEDRFFPLSGSLIFGKQGTGRDNVDADKVMITNEEEIKTTNPVATESYGQVATNHQSAQAQAQTGWVQNQGILPGMVWQDRDVYLQGPIWAKIPHTDGNFHPSPLMGGFGMKHPPPQILIKNTPVPADPPTAFNKDKLNSFITQYSTGQVSVEIEWELQKENSKRWNPEIQYTSNYCKSNNVEFAVNTEGVYSEPRPIGTRYLTRNL

SEQ ID NO: 2989 - protein, 736 aa, Artificial Sequence; identical to SEQ ID NO: 2985
  Synthetic polypeptide

SEQ ID NO: 2990 - DNA, 2208 bp, Artificial Sequence
  Synthetic polynucleotide
atggctgccgatggttatcttccagattggctcgaggacaaccttagtgaaggaattcgcgagtggtgggctttgaaacctggagcccctcaacccaaggcaaatcaacaacatcaagacaacgctcgaggtcttgtgcttccgggttacaaataccttggacccggcaacggactcgacaagggggagccggtcaacgcagcagacgcggcggccctcgagcacgacaaggcctacgaccagcagctcaaggccggagacaacccgtacctcaagtacaaccacgccgacgccgagttccaggagcggctcaaagaagatacgtcttttgggggcaacctcgggcgagcagtcttccaggccaaaaagaggcttcttgaacctcttggtctggttgaggaagcggctaagacggctcctggaaagaagaggcctgtagagcagtctcctcaggaaccggactcctccgcgggtattggcaaatcgggtgcacagcccgctaaaaagagactcaatttcggtcagactggcgacacagagtcagtcccagaccctcaaccaatcggagaacctcccgcagccccctcaggtgtgggatctcttacaatggcttcaggtggtggcgcaccagtggcagacaataacgaaggtgccgatggagtgggtagttcctcgggaaattggcattgcgattcccaatggctgggggacagagtcatcaccaccagcacccgaacctgggccctgcccacctacaacaatcacctctacaagcaaatctccaacagcacatctggaggatcttcaaatgacaacgcctacttcggctacagcaccccctgggggtattttgacttcaacagattccactgccacttctcaccacgtgactggcagcgactcatcaacaacaactggggattccggcctaagcgactcaacttcaagctcttcaacattcaggtcaaagaggttacggacaacaatggagtcaagaccatcgccaataaccttaccagcacggtccaggtcttcacggactcagactatcagctcccgtacgtgctcgggtcggctcacgagggctgcctcccgccgttcccagcggacgttttcatgattcctcagtacgggtatctgacgcttaatgatggaagccaggccgtgggtcgttcgtccttttactgcctggaatatttcccgtcgcaaatgctaagaacgggtaacaacttccagttcggctacgagtttgagaacgtacctttccatagcagctacgctcacagccaaagcctggaccgactaatgaatccactcatcgaccaatacttgtactatctctcaaagactattaacggttctggacagaatcaacaaacgctaaaattcagtgtggccggacccagcaacatggctgtccagggaagaaactacatacctggacccagctaccgacaacaacgtgtctcaaccactgtgactcaaaacaacaacagcgaatttgcttggcctggagcttcttcttgggctctcaatggacgtaatagcttgatgaatcctggacctgctatggccagccacaaagaaggagaggaccgtttctttcctttgtctggatctttaatttttggcaaacaaggaactggaagagacaacgtggatgcggacaaagtcatgataaccaacgaagaagaaattaaaactactaacccggtagcaacggagtcctatggacaagtggccacaaaccaccagagtgcccaagcacaggcgcagaccggctgggttcaaaaccaaggaatacttccgggtatggtttggcaggacagagatgtgtacctgcaaggacccatttgggccaaaattcctcacacggacggcaactttcacccttctccgctgatgggagggtttggaatgaagcacccgcctcctcagatcctcatcaaaaacacacctgtacctgcggatcctccaacggccttcaacaaggacaagctgaactctttcatcacccagtattctactggccaagtcagcgtggagatcgagtgggagctgcagaaggaaaacagcaagcgctgggacccggagatccagtacacttccaactattacaagtctaataatgttgaatttgctgttaatactgaaggtgtatatagtgaaccccgccccattggcaccagatacctgactcgtaatctg

SEQ ID NO: 2991 - DNA, 2208 bp, Artificial Sequence
  Synthetic polynucleotide
atggctgccgatggttatcttccagattggctcgaggacaaccttagtgaaggaattcgcgagtggtgggctttgaaacctggagcccctcaacccaaggcaaatcaacaacatcaagacaacgctcgaggtcttgtgcttccgggttacaaataccttggacccggcaacggactcgacaagggggagccggtcaacgcagcagacgcggcggccctcgagcacgacaaggcctacgaccagcagctcaaggccggagacaacccgtacctcaagtacaaccacgccgacgccgagttccaggagcggctcaaagaagatacgtcttttgggggcaacctcgggcgagcagtcttccaggccaaaaagaggcttcttgaacctcttggtctggttgaggaagcggctaagacggctcctggaaagaagaggcctgtagagcagtctcctcaggaaccggactcctccgcgggtattggcaaatcgggtgcacagcccgctaaaaagagactcaatttcggtcagactggcgacacagagtcagtcccagaccctcaaccaatcggagaacctcccgcagccccctcaggtgtgggatctcttacaatggcttcaggtggtggcgcaccagtggcagacaataacgaaggtgccgatggagtgggtagttcctcgggaaattggcattgcgattcccaatggctgggggacagagtcatcaccaccagcacccgaacctgggccctgcccacctacaacaatcacctctacaagcaaatctccaacagcacatctggaggatcttcaaatgacaacgcctacttcggctacagcaccccctgggggtattttgacttcaacagattccactgccgcttctcaccacgtgactggcagcgactcatcaacaacaactggggattccggcctaagcgactcaacttcaagctcttcaacattcaggtcaaagaggttacggacaacaatggagtcaagaccatcgccaataaccttaccagcacggtccaggtcttcacggactcagactatcagctcccgtacgtgctcgggtcggctcacgagggctgcctcccgccgttcccagcggacgttttcatgattcctcagtacgggtatctgacgcttaatgatggaagccaggccgtgggtcgttcgtccttttactgcctggaatatttcccgtcgcaaatgctaagaacgggtaacaacttccagttcagctacgagtttgagaacgtacctttccatagcagctacgctcacagccaaagcctggaccgactaatgaatccactcatcgaccaatacttgtactatctctcaaagactattaacggttctggacagaatcaacaaacgctaaaattcagtgtggccggacccagcaacatggctgtccagggaagaaactacatacctggacccagctaccgacaacaacgtgtctcaaccactgtgactcaaaacaacaacagcgaatttgcttggcctggagcttcttcttgggctctcaatggacgtaatagcttgatgaatcctggacctgctatggccagccacaaagaaggagaggaccgtttctttcctttgtctggatctttaatttttggcaaacaaggaactggaagagacaacgtggatgcggacaaagtcatgataaccaacgaagaagaaattaaaactactaacccggtagcaacggagtcctatggacaagtggccacaaaccaccagagtgcccaagcacaggcgcagaccggctgggttcaaaaccaaggaatacttccgggtatggtttggcaggacagagatgtgtacctgcaaggacccatttgggccaaaattcctcacacggacggcaactttcacccttctccgctgatgggagggtttggaatgaagcacccgcctcctcagatcctcatcaaaaacgcccctgtacctgcggatcctccaacggccttcaacaaggacaagctgaactctttcatcacccagtattctactggccaagtcagcgtggagatcgagtgggagctgcagaaggaaaacagcaagcgctggaacccggagatccagtacacttccaactattacaagtctaataatgttgaatttgctgttaatactgaaggtgtatatagtgaaccccgccccattggcaccagatacctgactcgtaatctg

SEQ ID NO: 2992 - DNA, 2208 bp, Artificial Sequence
  Synthetic polynucleotide
atggctgccgatggttatcttccagattggctcgaggacaaccttagtgaaggaattcgcgagtggtgggctttgaaacctggagcccctcaacccaaggcaaatcaacaacatcaagacaacgctcgaggtcttgtgcttccgggttacaaataccttggacccggcaacggactcgacaagggggagccggtcagcgcagcagacgcggcggccctcgagcacgacaaggcctacgaccagcagctcaaggccggagacaacccgtacctcaagtacaaccacgccgacgccgagttccaggagcggctcaaagaagatacgtcttttgggggcaacctcgggcgagcagtcttccaggccaaaaagaggcttcttgaacctcttggtctggttgaggaagcggctaagacggctcctggaaagaagaggcctgtagagcagtctcctcaggaaccggactcctccgcgggtattggcaaatcgggtgcacagcccgctaaaaagagactcaatttcggtcagactggcgacacagagtcagtcccagaccctcaaccaatcggagaacctcccgcagccccctcaggtgtgggatctcttacaatggcttcaggtggtggcgcaccagtggcagacaataacgaaggtgccgatggagtgggtagttcctcgggaaattggcattgcgattcccaatggctgggggacagagtcatcaccaccagcacccgaacctgggccctgcccacctacaacaatcacctctacaagcaaatctccaacagcacatctggaggatcttcaaatgacaacgcctacttcggctacagcaccccctgggggtattttgacttcaacagattccactgccacttctcaccgcgtgactggcagcgactcatcaacaacaactggggattccggcctaagcgactcaacttcaagctcttcaacattcaggtcaaagaggttacggacaacaatggagtcaagaccatcgccaataaccttaccagcacggtccaggtcttcacggactcagactatcagctcccgtacgtgctcgggtcggctcacgagggctgcctcccgccgttcccagcggacgttttcatgattcctcagtacgggtatctgacgcttaatgatggaagccaggccgtgggtcgttcgtccttttactgcctggaatatttcccgtcgcaaatgctaagaacgggtaacaacttccagttcagctacgagtttgagaacgtacctttccatagcagctacgctcacagccaaagcctggaccgactaatgaatccactcatcgaccaatacttgtactatctctcaaagactattaacggttctggacagaatcaacaaacgctaaaattcagtgtggccggacccagcaacatggctgtccagggaagaaactacatacctggacccagctaccgacaacaacgtgtctcaaccactgtgactcaaaacaacaacagcgaatttgcttggcctggagcttcttcttgggctctcaatggacgtaatagcttgatgaatcctggacctgctatggccagccacaaagaaggagaggaccgtttctttcctttgtctggatctttaatttttggcaaacaaggaactggaagagacaacgtggatgcggacaaagtcatgataaccaacgaagaagaaattaaaactactaacccggtagcaacggagtcctatggacaagtggccacaaaccaccagagtgcccaagcacaggcgcagaccggctgggttcaaaaccaaggaatacttccgggtatggtttggcaggacagagatgtgtacctgcaaggacccatttgggccaaaattcctcacacggacggcaactttcacccttctccgctgatgggagggtttggaatgaagcacccgcctcctcagatcctcatcaaaaacacacctgtacctgcggatcctccaacggccttcaacaaggacaagctgaactctttcatcacccagtattctactggccaagtcagcgtggagatcgagtgggagctgcagaaggaaaacagcaagcgctggaacccggagatccagtacacttccaactattacaagtctaataatgttgaatttgctgttaatactgaaggtgtatatagtgaaccccgccccattggcaccagatacctgactcgtaatctg

SEQ ID NO: 2993 - DNA, 2208 bp, Artificial Sequence
  Synthetic polynucleotide
atggctgccgatggttatcttccagattggctcgaggacaaccttagtgaaggaattcgcgagtggtgggctttgaaacctggagcccctcaacccaaggcaaatcaacaacatcaagacaacgctcgaggtcttgtgcttccgggttacaaataccttggacccggcaacggactcgacaagggggagccggtcaacgcagcagacgcggcggccctcgagcacgacaaggcctacgaccagcagctcaaggccggagacaacccgtacctcaagtacaaccacgccgacgccgagttccaggagcggctcaaagaagatacgtcttttgggggcaacctcgggcgagcagtcttccaggccaaaaagaggcttcttgaacctcttggtctggttgaggaagcggctaagacggctcctggaaagaagaggcctgtagagcagtctcctcaggaaccggactcctccgcgggtattggcaaatcgggtgcacagcccgctaaaaagagactcaatttcggtcagactggcgacacagagtcagtcccagaccctcaaccaatcggagaacctcccgcagccccctcaggtgtgggatctcttacaatggcttcaggtggtggcgcaccagtggcagacaataacgaaggtgccgatggagtgggtagttcctcgggaaattggcattgcgattcccaatggctgggggacagagtcatcaccaccagcacccgaacctgggccctgcccacctacaacaatcacctctacaagcaaatctccaacagcacatctggaggatcttcaaatgacaacgcctacttcggctacagcaccccctgggggtattttgacttcaacagattccactgccacttctcaccacgtgactggcagcgactcatcaacaacaactggggattccggcctaagcgactcaacttcaagctcttcaacattcaggtcaaagaggttacggacaacaatggagtcaagaccatcgccaataaccttaccagcacggtccaggtcttcacggactcagactatcagctcccgtacgtgctcgggtcggctcacgagggctgcctcccgccgttcccagcggacgttttcatgattcctcagtacgggtatctgacgcttaatgatggaagccaggccgtgggtcgttcgtccttttactgcctggaatatttcccgtcgcaaatgctaagaacgggtaacaacttccagttcagctacgagtttgagaacgtacctttccatagcagctacgctcacagccaaagcctggaccgactaatgaatccactcatcgaccaatacttgtactatctctcaaagactattaacggttctggacagaatcaacaaacgctaaaattcagtgtggccggacccagcaacacggctgtccagggaagaaactacatacctggacccagctaccgacaacaacgtgtctcaaccactgtgactcaaaacaacaacagcgaatttgcttggcctggagcttcttcttgggctctcaatggacgtaatagcttgatgaatcctggacctgctatggccagccacaaagaaggagaggaccgtttctttcctttgtctggatctttaatttttggcaaacaaggaactggaagagacaacgtggatgcggacaaagtcatgataaccaacgaagaagaaattaaaactactaacccggtagcaacggagtcctatggacaagtggccacaaaccaccagagtgcccaagcacaggcgcagaccggctgggttcaaaaccaaggaatacttccgggtatggtttggcaggacagagatgtgtacctgcaaggacccatttgggccaaaattcctcacacggacggcaactttcacccttctccgctgatgggagggtttggaatgaagcacccgcctcctcagatcctcatcaaaaacacacctgtacctgcggatcctccaacggccttcaacaaggacaagctgaactctttcatcacccagtattctactggccaagtcagcgtggagatcgagtgggagctgcagaaggaaaacagcaagcgctggaacccggagatccagtacacttccaactattacaagtctaataatgttgaatttgctgttaatactgaaggtgtatatagtgaaccccgccccattggcaccagatacctgactcgtaatctg

SEQ ID NO: 2994 - DNA, 2208 bp, Artificial Sequence
  Synthetic polynucleotide
atggctgccgatggttatcttccagattggctcgaggacaaccttagtgaaggaattcgcgagtggtgggctttgaaacctggagcccctcaacccaaggcaaatcaacaacatcaagacaacgctcgaggtcttgtgcttccgggttacaaataccttggacccggcaacggactcgacaagggggagccggtcaacgcagcagacgcggcggccctcgagcacgacaaggcctacgaccagcagctcaaggccggagacaacccgtacctcaagtacaaccacgccgacgccgagttccaggagcggctcaaagaagatacgtcttttgggggcaacctcgggcgagcagtcttccaggccaaaaagaggcttcttgaacctcttggtctggttgaggaagcggctaagacggctcctggaaagaagaggcctgtagagcagtctcctcaggaaccggactcctccgcgggtattggcaaatcgggtgcacagcccgctaaaaagagactcaatttcggtcagactggcgacacagagtcagtcccagaccctcaaccaatcggagaacctcccgcagccccctcaggtgtgggatctcttacaatggcttcaggtggtggcgcaccagtggcagacaataacgaaggtgccgatggagtgggtagttcctcgggaaattggcattgcgattcccaatggctgggggacagagtcatcaccaccagcacccgaacctgggccctgcccacctacaacaatcacctctacaagcaaatctccaacagcacatctggaggatcttcaaatgacaacgcctacttcggctacagcaccccctgggggtattttgacttcaacagattccactgccacttctcaccacgtgactggcagcgactcatcaacaacaactggggattccggcctaagcggctcaacttcaagctcttcaacattcaggtcaaagaggttacggacaacaatggagtcaagaccatcgccaataaccttaccagcacggtccaggtcttcacggactcagactatcagctcccgtacgtgctcgggtcggctcacgagggctgcctcccgccgttcccagcggacgttttcatgattcctcagtacgggtatctgacgcttaatgatggaagccaggccgtgggtcgttcgtccttttactgcctggaatatttcccgtcgcaaatgctaagaacgggtagcaacttccagttcagctacgagtttgagaacgtacctttccatagcagctacgctcacagccaaagcctggaccgactaatgaatccactcatcgaccaatacttgtactatctctcaaagactattaacggttctggacagaatcaacaaacgctaaaattcagtgtggccggacccagcaacatggctgtccagggaagaaactacatacctggacccagctaccgacaacaacgtgtctcaaccactgtgactcaaaacaacaacagcgaatttgcttggcctggagcttcttcttgggctctcaatggacgtaatagcttgatgaatcctggacctgctatggccagccacaaagaaggagaggaccgtttctttcctttgtctggatctttaatttttggcaaacaaggaactggaagagacaacgtggatgcggacaaagtcatgataaccaacgaagaagaaattaaaactactaacccggcagcaacggagtcctatggacaagtggccacaaaccaccagagtgcccaagcacaggcgcagaccggctgggttcaaaaccaaggaatacttccgggtatggtttggcaggacagagatgtgtacctgcaaggacccatttgggccaaaattcctcacacggacggcaactttcacccttctccgctgatgggagggtttggaatgaagcacccgcctcctcagatcctcatcaaaaacacacctgtacctgcggatcctccaacggccttcaacaaggacaagctgaactctttcatcacccagtattctactggccaagtcagcgtggagatcgagtgggagctgcagaaggaaaacagcaagcgctggaacccggagatccagcacacttccaactattacaagtctaataatgttgaatttgctgttaatactgaaggtgtatatagtgaaccccgccccattggcaccagatacctgactcgtaatctg

SEQ ID NO: 2995 - DNA, 2208 bp, Artificial Sequence
  Synthetic polynucleotide
atggctgccgatggttatcttccagattggctcgaggacaaccttagtgaaggaattcgcgagtggtgggctttgaaacctggagcccctcaacccaaggcaaatcaacaacatcaagacaacgctcgaggtcttgtgcttccgggttacaaataccttggacccggcaacggactcgacaagggggagccggtcaacgcagcagacgcggcggccctcgagcacgacaaggcctacgaccagcagctcaaggccggagacaacccgtacctcaagtacaaccacgccgacgccgagttccaggagcggctcaaagaagatacgtcttttgggggcaacctcgggcgagcagtcttccaggccaaaaagaggcttcttgaacctcttggtctggttgaggaagcggctaagacggctcctggaaagaagaggcctgtagagcagtctcctcaggaaccggactcctccgcgggtattggcaaatcgggtgcacagcccgctaaaaagagactcaatttcggtcagactggcgacacagagtcagtcccagaccctcaaccaatcggagaacctcccgcagccccctcaggtgtgggatctcttacaatggcttcaggtggtggcgcaccagtggcagacaataacgaaggtgccgatggagtgggtagttcctcgggaaattggcattgcgattcccaatggctgggggacagagtcatcaccaccagcacccgaacctgggccctgcccacctacaacaatcacctctacaagcaaatctccaacagcacatctggaggatcttcaaatgacaacgcctacttcggctacagcaccccctgggggtattttgacttcaacagattccactgccacttctcaccacgtgactggcagcgactcatcaacaacaactggggattccggcctaagcgactcaacttcaggctcttcaacattcaggtcaaagaggttacggacaacaatggagtcaagaccatcgccaataaccttaccagcacggtccaggtcttcacggactcagactatcagctcccgtacgtgctcgggtcggctcacgagggctgcctcccgccgttcccagcggacgttttcatgattcctcagtacgggtatctgacgcttaatgatggaagccaggccgtgggtcgttcgtccttttactgcctggaatatttcccgtcgcaaatgctaagaacgggtaacaacttccagttcagctacgagtttgagaacgtacctttccatagcagctacgctcacagccaaagcctggaccgactaatgaatccactcatcgaccaatacttgtactatctctcaaagactattaacggttctggacagaatcaacaaacgctaaaattcagtgtggccggacccagcaacatggctgtccagggaagaaactacatacctggacccagctaccgacaacaacgtgtctcaaccactgtgactcaaaacaacaacagcgaatttgcttggcctggagcttcttcttgggctctcaatggacgtaatagcttgatgaatcctggacctgctatggccagccacaaagaaggagaggaccgtttctttcctttgtctggatctttaatttttggcaaacaaggaactggaagagacaacgtggatgcggacaaagtcatgataaccaacgaagaagaaattaaaactactaacccggtagcaacggagtcctatggacaagtggccacaaaccaccagagtgcccaagcacaggcgcagaccggctgggttcaaagccaaggaatacttccgggtatggtttggcaggacagagatgtgtacctgcaaggacccatttgggccaaaattcctcacacggacggcaactttcacccttctccgctgatgggagggtttggaatgaagcacccgcctccccagatcctcatcaaaaacacacctgtacctgcggatcctccaacggccttcaacaaggacaagctgaactctttcatcacccagtattctactggccaagtcagcgtggagatcgagtgggagctgcagaaggaaaacagcaagcgctggaacccggagatccagtacacttccaactattacaagtctaataatgttgaatttgctgttaatactgaaggtgtatatagtgaaccccgccccattggcaccagatacctgactcgtaatctg

SEQ ID NO: 2996 - DNA, 2205 bp, Artificial Sequence
  Synthetic polynucleotide
atggctgccgatggttatcttccagattggctcgaggacaaccttagtgaaggaattcgcgagtggtgggctttgaaacctggagcccctcaacccaaggcaaatcaacaacatcaagacaacgcccgaggtcttgtgcttccgggttacaaataccttggacccggcaacggactcgacaagggggagccggtcaacgcagcagacgcggcggccctcgagcacgacaaggcctacgaccagcagctcaaggccggagacaacccgtacctcaagtacaaccacgccgacgccgagttccaggagcggctcaaagaagatacgtcttttgggggcaacctcgggcgagcagtcttccaggccaaaaagaggcttcttgaacctcttggtctggttgaggaagcggctaagacggctcctggaaagaagaggcctgtagagcagtctcctcaggaaccggactcctccgcgggtattggcaaatcgggtgcacagcccgctaaaaagagactcaatttcggtcagactggcgacacagagtcagtcccagaccctcaaccaatcggagaacctcccgcagccccctcaggtgtgggatctcttacaatggcttcaggtggtggcgcaccagtggcagacaataacgaaggtgccgatggagtgggtagttcctcgggaaattggcattgcgattcccaatggctgggggacagagtcatcaccaccagcacccgaacctgggccctgcccacctacaacaatcacctctacaagcaaatctccaacagcacatctggaggatcttcaaatgacaacgcctacttcggctacagcaccccctggaggtattttgacttcaacagattccactgccacttctcaccacgtgactggcagcgactcatcaacaactggggattccggcctaagcgactcaacttcaagctcttcaacattcaggtcaaagaggttacggacaacaatggagtcaagaccatcgccaataaccttaccagcacggtccaggccttcacggactcagactatcagctcccgtacgtgctcgggtcggctcacgagggctgcctcccgccgttcccagcggacgttttcatgattcctcagtacgggtatctgacgcttaatgatggaagccaggccgtgggtcgttcgtccttttactgcctggaatatttcccgtcgcaaatgctaagaacgggtaacaacttccagttcagctacgagtttgagaacgtacctttccatagcagctacgctcacagccaaagcctggaccgactaatgaatccactcatcgaccaatacttgtactatctctcaaagactattaacggttctggacagaatcaacaaacgctaaaattcagtgtggccggacccagcaacatggctgtccagggaagaaactacatacctggacccagctaccgacaacaacgtgtctcaaccactgtgactcaaaacaacaacagcgaatttgcttggcctggagcttcttcttgggctctcaatggacgtaatagcttgatgaatcctggacctgctatggccagccacaaagaaggagaggaccgtttctttcctttgtctggatctttaatttttggcaaacaaggaactggaagagacaacgtggatgcggacaaagtcatgataaccaacgaagaagaaattaaaactactaacccggtagcaacggagtcctatggacaagtggccacaaaccaccagagtgcccaagcacaggcgcagaccggctgggttcaaaaccaaggaatacttccgggtatggtttggcaggacagagatgtgtacctgcaaggacccatttgggccaaaattcctcacacggacggcaactttcacccttctccgctgatgggagggtttggaatgaagcacccgcctcctcagatcctcatcaaaaacacacctgtacctgcggatcctccaacggccttcaacaaggacgagctgaactctttcatcacccagtattctactggccaagtcagcgtggagatcgagtgggagctgcagaaggaaaacagcaagcgctggaacccggagatccagtacacttccaactattacaagtctaataatgttgaatttgctgttaatactgaaggtgtatatagtgaaccccgccccattggcaccagatacctgactcgtaatctg

SEQ ID NO: 2997 - DNA, 2205 bp, Artificial Sequence
  Synthetic polynucleotide
atggctgccgatggttatcttccagattggctcgaggacaaccttagtgaaggaattcgcgagtggtgggctttgaaacctggagcccctcaacccaaggcaaatcaacaacatcaagacaacgctcgaggtcttgtgcttccgggttacaaataccttggacccggcaacggactcgacaagggggagccggtcaacgcagcagacgcggcggccctcgagcacgacaaggcctacgaccagcagctcaaggccggagacaacccgtacctcaagtacaaccacgccgacgccgagttccaggagcggctcaaagaagatacgtcttttgggggcaacctcgggcgagcagtcttccaggacaaaaagaggcttcttgaacctcttggtctggttgaggaagcggctaagacggctcctggaaagaagaggcctgtagagcagtctcctcaggaaccggactcctccgcgggtattggcaaatcgggtgcacagcccgctaaaaagagactcaatttcggtcagactggcgacacagagtcagtcccagaccctcaaccaatcggagaacctcccgcagccccctcaggtgtgggatctcttacaatggcttcaggtggtggcgcaccagtggcagacaataacgaaggtgccgatggagtgggtagttcctcgggaaattggcattgcgattcccaatggctgggggacagagtcatcaccaccagcacccgaacctgggccctgcccacctacaacaatcacctctacaagcaaatctccaacagcacatctggaggatcttcaaatgacaacgcctacttcggctacagcaccccctgggggtattttgacttcaacagattccactgccacttctcaccacgtgactggcagcgactcatcaacaactggggattccggcctaagcgactcaacttcaagctcttcaacattcaggtcaaagaggttacggacaacaatggagtcaagaccatcgccaataaccttaccagcacggtccaggtcttcacggactcagactatcagctcccgtacgtgctcgggtcggctcacgagggctgcctcccgccgttcccagcggacgttttcatgattcctcagtacgggtatctgacgcttaatgatggaagccaggccgtgggtcgttcgtccttttactgcctggaatatttcccgtcgcaaatgctaagaacgggtaacaacttccaattcagctacgagtttgagaacgtacctttccatagcagctacgctcacagccaaagcctggaccgactaatgaatccactcatcgaccaatacttgtactatctctcaaagactattaacggttctggacagaatcaacaaacgctaaaattcagtgtggccggacccagcaacatggctgtccagggaagaaactacatacctggacccagctaccgacaacaacgtgtctcaaccactgtgactcaaaacaacaacagcgaatttgcttggcctggagcttcttcttgggctctcaatggacgtaatagcttgatgaatcctggacctgctatggccagccacaaagaaggagaggaccgtttctttcctttgtctggatctttaatttttggcaaacaaggaactggaagagacaacgtggatgcggacaaagtcatgataaccaacgaagaagaaattaaaactactaacccggtagcaacggagtcctatggacaagtggccacaaaccaccagagtgcccaagcacaggcgcagaccggctgggttcaaaaccaaggaatacttccgggtatggtttggcaggacagagatgtgtacctgcaaggacccatttgggccaaaattcctcacacggacggcaactttcacccttctccgctgatgggagggtttggaatgaagcacccgcctcctcagatcctcatcaaaaacacacctgtacctgcggatcctccaacggccttcaacaaggacaagctgaactctttcatcacccagtattctactggccaagtcagcgtggagatcgagtgggagctgcagaaggaaaacagcaagcgctggaacccggagatccagtacacttccaactattacaagtctaataatgttgaatttgctgttaatactgaaggtgtatatagtgaaccccgccccattggcaccagatacctgactcgtaatctg

SEQ ID NO: 2998 - DNA, 2208 bp, Artificial Sequence
  Synthetic polynucleotide
atggctgccgatggttatcttccagattggctcgaggacaaccttagtgaaggaattcgcgagtggtgggctttgaaacctggagcccctcaacccaaggcaaatcaacaacatcaagacaacgctcgaggtcttgtgcttccgggttacaaataccttggacccggcaacggactcgacaagggggagccggtcaacgcagcagacgcggcggccctcgagcacgacaaggcctacgaccagcagctcaaggccggagacaacccgtacctcaagtacaaccacgccgacgccgagttccaggagcggctcaaagaagatacgtcttttgggggcaacctcgggcgagcagtcttccaggccaaaaagaggcttcttgaacctcttggtctggttgaggaagcggctaagacggctcctggaaagaagaggcctgtagagcagtctcctcaggaaccggactcctccgcgggtattggcaaatcgggtgcacagcccgctaaaaagagactcaatttcggtcagactggcgacacagagtcagtcccagaccctcaaccaatcggagaacctcccgcagccccctcaggtgtgggatctcttacaatggcttcaggtggtggcgcaccagtggcagacaataacgaaggtgccgatggagtgggtagttcctcgggaaattggcattgcgattcccaatggctgggggacagagccatcaccaccagcacccgaacctgggccctgcccacctacaacaatcacctctacaagcaaatctccaacagcacatctggaggatcttcaaatgacaacgcctacttcggctacagcaccccctgggggtattttgacttcaacagattccactgccacttctcaccacgtgactggcagcggctcatcaacaacaactggggattccggcctaagcgactcaacttcaagctcttcaacattcaggtcaaagaggttacggacaacaatggagtcaagaccatcgccaataaccttaccagcacggtccaggtcttcacggactcagactatcagctcccgtacgtgctcgggtcggctcacgagggctgcctcccgccgttcccagcggacgttttcatgattcctcagtacgggtatctgacgcttaatgatggaagccaggccgtgggtcgttcgtccttttactgcctggaatatttcccgtcgcaaatgctaagaacgggtaacaacttccagttcagctacgagtttgagaacgtacctttccatagcagctacgctcacagccaaagcctggaccgactaatgaatccactcatcgaccaatacttgtactatctctcaaagactattaacggttctggacagaatcaacaaacgctaaaattcagtgtggccggacccagcaacatggctgtccagggaagaaactacatacctggacccagctaccgacaacaacgtgtctcaaccactgtgactcaaaacaacaacagcgaatttgcttggcctggagcttcttcttgggctctcaatggacgtaatagcttgatgaatcctggacctgctatggccagccacaaagaaggagaggaccgtttctttcctttgtctggatctttaatttttggcaaacaaggaactggaagagacaacgtggatgcggacaaagtcatgacaaccaacgaagaagaaattaaaactactaacccggtagcaacggagtcctatggacaagtggccacaaaccaccagagtgcccaagcacaggcgcagaccggctgggttcaaaaccaaggaatacttccgggtatggtttggcaggacagagatgtgtacctgcaaggacccatttgggccaaaattcctcacacggacggcaactttcacccttctccgctgatgggagggtttggaatgaagcacccgcctcctcagatcctcatcaaaaacacacctgtacctgcggatcctccaacggccttcaacaaggacaagctgaactctttcatcacccagtattctactggccaagtcagcgtggagatcgagtgggagctgcagaaggaaaacagcaagcgctggaacccggagatccagtacacttccaactattacaagtctaataatgttgaatttgctgttaatactgaaggtgtatatagtgaaccccgccccattggcaccagatacctgactcgtaatctg

SEQ ID NO: 2999 - DNA, 2208 bp, Artificial Sequence
  Synthetic polynucleotide
atggctgccgatggttatcttccagattggctcgaggacaaccttagtgaaggaattcgcgagtggtgggctttgaaacctggagcccctcaacccaaggcaaatcaacaacatcaagacaacgctcgaggtcttgtgcttccgggttacaaataccttggacccggcaacggactcgacaagggggagccggtcaatgcagcagacgcggcggccctcgagcacgacaaggcctacgaccagcagctcaaggccggagacaacccgtacctcaagtacaaccacgccgacgccgagttccaggagcggctcaaagaagatacgtcttttgggggcaacctcgggcgagcagtcttccagaccaaaaagaggcttcttgaacctcttggtctggttgaggaagcggctaagacggctcctggaaagaagaggcctgtagagcagtctcctcaggaaccgggctcctccgcgggtattggcaaatcgggtgcacagcccgctaaaaagagactcaatttcggtcagactggcgacacagagtcagtcccagaccctcaaccaatcggagaacctcccgcagccccctcaggtgtgggatctcttacaatggcttcaggtggtggcgcaccagtggcagacaataacgaaggtgccgatggagtgggtagttcctcgggaaattggcattgcgattcccaatggctgggggacagagtcatcaccaccagcacccgaacctgggccctgcccacctacaacaatcacctctacaagcaaatctccaacagcacatctggaggatcttcaaatgacaacgcctacttcggctacagcaccccctgggggtattttgacttcaacagattccactgccacttctcaccacgtgactggcagcgactcatcaacaacaactggggattccggcctaagcgactcaacttcaagctcttcaacattcaggtcaaagaggttacggacaacaatggagtcaagaccatcgccaataaccttaccagcacggtccaggtcttcacggactcagactatcagctcccgtacgtgctcgggtcggctcacgagggctgcctcccgccgttcccagcggacgttttcatgattcctcagtacgggtatctgacgcttaatgatggaagccaggccgtgggtcgttcgtccttttactgcctggaatatttcccgtcgcaaatgctaagaacgggtaacaacttccagttcagctacgagtttgagaacgtacctttccatagcagctacgctcacagccaaagcctggaccgactaatgaatccactcatcgaccaatacttgcactatctctcaaagactattaacggttctggacagaatcaacaaacgctaaaattcagtgtggccggacccagcaacatggctgtccagggaagaaactacatacctggacccagctaccgacaacaacgtgtctcaaccactgtgactcaaaacaacaacagcgaatttgcttggcctggagcttcttcttgggctctcaatggacgtaatagcttgatgaatcctggacctgctatggccagccacaaagaaggagaggaccgtttctttcctttgtctggatctttaatttttggcaaacaaggaactggaagagacaacgtggatgcggacaaagtcatgataaccaacgaagaagaaattaaaactactaacccggtagcaacggagtcctatggacaagtggccacaaaccaccagagtgcccaagcacaggcgcagaccggctgggttcaaaaccaaggaatacttccgggtatggtttggcaggacagagatgtgtacctgcaaggacccatttgggccaaaattcctcacacggacggcaactttcacccttctccgctgatgggagggtttggaatgaagcacccgcctcctcagatcctcatcaaaaacacacctgtacctgcggatcctccaacggccttcaacaaggacaagctgaactctttcatcacccagtattctactggccaagtcagcgtggagatcgagtgggagctgcagaaggaaaacagcaagcgctggaacccggagatccagtacacttccaactattacaagtctaataatgttgaatttgctgttaatactgaaggtgtatatagtgaaccccgccccattggcaccagatacctgactcgtaatctg

SEQ ID NO: 3000 - DNA, 2208 bp, Artificial Sequence
  Synthetic polynucleotide
atggctgccgatggttattttccagattggctcgaggacaaccttagtgaaggaattcgcgagtggtgggctttgaaacctggagcccctcaacccaaggcaaatcaacaacatcaagacaacgctcgaggtcttgtgcttccgggttacaaataccttggacccggcaacggactcgacaagggggagccggtcaacgcagcagacgcggcggccctcgagcacgacaaggcctacgaccagcagctcaaggccggagacaacccgtacctcaagtacaaccacgccgacgccgagttccaggagcggctcaaagaagatacgtcttttgggggcaacctcgggcgagcagtcttccaggccaaaaagaggcttcttgaacctcttggtctggttgaggaagcggctaagacggctcctggaaagaagaggcctgtagagcagtctcctcaggaaccggactcctccgcgggtattggcaaatcgggtgcacagcccgctaaaaagagactcaatttcggtcagactggcgacacagagtcagtcccagaccctcaaccaatcggagaatctcccgcagccccctcaggtgtgggatctcttacaatggcttcaggtggtggcgcaccagtggcagacaataacgaaggtgccgatggagtgggtagttcctcgggaaattggcattgcgattcccaatggctgggggacagagtcatcaccaccagcacccgaacctgggccctgcccacctacaacaatcacctctacaagcaaatctccaacagcacatctggaggatcttcaaatgacaacgcctacttcggctacagcaccccctgggggtattttgacttcaacagattccactgccacttctcaccacgtgactggcagcgactcatcaacaacaactggggattccggcctaagcgactcaacttcaagctcttcaacattcaggtcaaagaggttacggacaacaatggagtcaagaccatcgccaataaccttaccagcacggtccaggtcttcacggactcagactatcagctcccgtacgtgctcgggtcggctcacgagggctgcctcccgccgttcccagcggacgttttcatgattcctcagtacgggtatctgacgcttaatgatggaagccaggccgtgggtcgttcgtccttttactgcctggaatatctcccgtcgcaaatgctaagaacgggtaacaacttccagttcagctacgagtttgagaacgtacctttccatagcagctacgctcacagccaaagcctggaccgactaatgaatccactcatcgaccaatacttgcactatctctcaaagactattaacggttctggacagaatcaacaaacgctaaaattcagtgtggccggacccagcaacatggctgtccagggaagaaactacatacctggacccagctaccgacaacaacgtgtctcaaccactgtgactcaaaacaacaacagcgaatttgcttggcctggagcttcttcttgggctctcaatggacgtaatagcttgatgaatcctggacctgctgtggccagccacaaagaaggagaggaccgtttctttcctttgtctggatctttaatttttggcaaacaaggaactggaagagacaacgtggatgcggacaaagtcatgataaccaacgaagaagaaattaaaactactaacccggtagcaacggagtcctatggacaagtggccacaaaccaccagagtgcccaagcacaggcgcagaccggctgggttcaaaaccaaggaatacttccgggtatggtttggcaggacagagatgtgtacctgcaaggacccatttgggccaaaattcctcacacggacggcaactttcacccttctccgctgatgggagggtttggaatgaagcacccgcctcctcagatcctcatcaaaaacacacctgtacctgcggatcctccaacggccttcaacaaggacaagctgaactctttcatcacccagtattctactggccaagtcagcgtggagatcgagtgggagctgcagaaggaaaacagcaagcgctggaacccggagatccagtacacttccaactattacaagtctaataatgttgaatttgctgttaatactgaaggtgtatatagtgaaccccgccccattggcaccagatacctgactcgtaatctg

SEQ ID NO: 3001 - DNA, 2208 bp, Artificial Sequence
  Synthetic polynucleotide
atggctgccgatggttatcttccagattggctcgaggacaaccttagtgaaggaattcgcgagtggtgggctttgaaacctggagcccctcaacccaaggcaaatcaacaacatcaagacaacgctcgaggtcttgtgcttccgggttacaaataccttggacccggcaacggactcgacaagggggagccggtcaacgcagcagacgcggcggccctcgagcacgacaaggcctacgaccagcagctcaaggccggagacaacccgtacctcaagtacaaccacgccgacgccgagttccaggagcggctcaaagaagatacgtcttttgggggcaacctcgggcgagcagtcttccaggccaaaaagaggcttcttgaacctcttggtccggttgaggaagcggctaagacggctcctggaaagaagaggcctgtagagcagtctcctcaggaaccggactcctccgcgggtattggcaaatcgggtgcacagcccgctaaaaagagactcaatttcggtcagactggcgacacagagtcagtcccagaccctcaaccaatcggagaacctcccgcagccccctcaggtgtgggatctcttacaatggcttcaggtggtggcgcaccagtggcagacaataacgaaggtgccgatggagtgggtagttcctcgggaaattggcattgcgattcccaatggctgggggacagagtcatcaccaccagcacccgaacctgggccctgcccacctacaacaatcacctctacaagcaaatctccaacagcacatctggaggatcttcaaatgacaacgcctacttcggctacagcaccccctgggggtattttgacttcaacagattccactgccacttctcaccacgtgactggcagcgactcatcaacaacaactggggattccggcctaagcgactcaacttcaagctcttcaacattcaggtcaaagaggttacggacaacaatggagtcaagaccatcgccaataaccttaccagcacggtccaggtcttcacggactcagactatcagctcccgtacgtgctcgggtcggctcacgagggctgcctcccgccgttcccagcggacgttttcatgattcctcagtacgggtatctgacgcttaatgatggaagccaggccgtgggtcgttcgtccttttactgcctggaatatttcccgtcgcaaatgctaagaacgggtaacaacttccagttcagctacgagtttgagaacgtacctttccatagcagctacgctcacagccaaagcctggaccgactaatgaatccactcatcgaccaatacttgtactatctctcaaagactattaacggttctggacagaatcaacaaacgctaaaattcagtgtggccggacccagcaacatggctgtccagggaagaaactacatacctggacccagctaccgacaacaacgtgtctcaaccactgtgactcaaaacaacaacagcgaatttgcttggcctggagcttcttcttgggctctcaatggacgtaatagcttgatgaatcctggacctgctatggccagccacaaagaaggagaggaccgtttctttcctttgtctggatctttaatttttggcaaacaaggaactggaagagacaacgtggatgcggacaaagtcatgataaccaacgaagaagaaattaaaactactaacccggtagcaacggagtcctatggacaagcggccacaaaccaccagagtgcccaagcacaggcgcagaccggctgggttcaaaaccaaggaatacttccgggtatggtttggcaggacagagatgtgtacctgcaaggacccatttgggccaaaattcctcacacggacggcaactttcacccttctccgctgatgggagggtttggaatgaagcacccgcctcctcagatcctcatcaaaaacacacctgtacctgcggatcctccaacggccttcaacaaggacaagctgaactctttcatcacccagtattctactggccaagtcagcgtggagatcgagtgggagctgcagaaggaaaacagcaagcgctggaacccggagatccagtacacttccaactattacaagtctaataatgttgaatttgctgttaatactgaaggtgtatatagtgaaccccgccccattggcaccagatacctgactcgtaatctg

SEQ ID NO: 3002 - DNA, 2208 bp, Artificial Sequence
  Synthetic polynucleotide
atggctgccgatggttatcttccagattggctcgaggacaaccttagtgaaggaattcgcgagtggtgggctttgaaacctggagcccctcaacccaaggcaaatcaacaacatcaagacaacgctcggggtcttgtgcttccgggttacaaataccttggacccggcaacggactcgacaagggggagccggtcaacgcagcagacgcggcggccctcgagcacgacaaggcctacgaccagcagctcaaggccggagacaacccgtacctcaagtacaaccacgccgacgccgagttccaggagcggctcaaagaagatacgtcttttgggggcaacctcgggcgagcagtcttccaggccaaaaagaggcttcttgaacctcttggtccggttgaggaagcggctaagacggctcctggaaagaagaggcctgtagagcagtctcctcaggaaccggactcctccgcgggtattggcaaatcgggtgcacagcccgctaaaaagagactcaatttcggtcagactggcgacacagagtcagtcccagaccctcaaccaatcggagaacctcccgcagccccctcaggtgtgggatctcttacaatggcttcaggtggtggcgcaccagtggcagacaataacgaaggtgccgatggagtgggtagttcctcgggaaattggcattgcgattcccaatggctgggggacagagtcatcaccaccagcacccgaacctgggccctgcccacctacaacaatcacctctacaagcaaatctccaacagcacatctggaggatcttcaaatgacaacgcctacttcggctacagcaccccctgggggtattttgacttcaacagattccactgccacttctcaccacgtgactggcggcgactcatcaacaacaactggggattccggcctaagcgactcaacttcaagctcttcaacattcaggtcaaagaggttacggacaacaatggagtcaagaccatcgccaataaccttaccagcacggtccaggtcttcacggactcagactatcagctcccgtacgtgctcgggtcggctcacgagggctgcctcccgccgttcccagcggacgttttcatgattcctcagtacgggtatctgacgcttaatgatggaagccaggccgtgggtcgttcgtccttttactgcctggaatatttcccgtcgcaaatgctaagaacgggtaacaacttccagttcagctacgagtttgagaacgtacctttccatagcagctacgctcacagccaaagcctggaccgactaatgaatccactcatcgaccaatacttgtactatctctcaaagactattaacggttctggacagaatcaacaaacgctaaaattcagtgtggccggacccagcaacatggctgtccagggaagaaactacatacctggacccagctaccgacaacaacgtgtctcaaccactgtgactcaaaacaacaacagcgaatttgcttggcctggagcttcttcttgggctctcaatggacgtaatagcttgatgaatcctggacctgctatggccagccacaaagaaggagaggaccgtttctttcctttgtctggatctttaatttttggcaaacaaggaactggaagagacaacgtggatgcggacaaagtcatgataaccaacgaagaagaaattaaaactactaacccggtagcaacggagtcctatggacaagtggccacaaaccaccagagtgcccaagcacaggcgcagaccggctgggttcaaaaccaaggaatacttccgggtatggtttggcaggacagagatgtgtacctgcaaggacccatttgggccaaaattcctcacacggacggcaactttcacccttctccgctgatgggagggtttggaatgaagcacccgcctcctcagatcctcatcaaaaacacacctgtacctgcggatcctccaacggccttcaacaaggacaagctgaactctttcatcacccagtattctactggccaagtcagcgtggagatcgagtgggagctgcagaaggaaaacagcaagcgctggaacccggagatccagtacacttccaactattacaagtctaataatgttgaatttgctgttaatactgaaggtgtatatagtgaaccccgccccattggcaccagatacctgactcgtaatctg

SEQ ID NO: 3003 - DNA, 2208 bp, Artificial Sequence
  Synthetic polynucleotide
atggctgccgatggttatcttccagattggctcgaggacaaccttagtgaaggaattcgcgagtggtgggctttgaaacctggagcccctcaacccaaggcaaatcaacaacatcaagacaacgctcgaggtcttgtgcttccgggttacaaataccttggacccggcaacggactcgacaagggggagccggtcaacgcagcagacgcggcggccctcgagcacgacaaggcctacgaccagcagctcaaggccggagacaacctgtacctcaagtacaaccacgccgacgccgagttccaggagcggctcaaagaagatacgtcttttgggggcaacctcgggcgagcagtcttccaggccaaaaagaggcttcttgaacctcttggtctggttgaggaagcggctaagacggctcctggaaagaagaggcctgtagagcagtctcctcaggaaccggactcctccgcgggtattggcaaatcgggtgcacagcccgctaaaaagagactcaatttcggtcagactggcgacacagagtcagtcccagaccctcaaccaatcggagaacctcccgcagccccctcaggtgtgggatctcttacaatggcttcaggtggtggcgcaccagtggcagacaataacgaaggtgccgatggagtgggtagttcctcgggaaattggcattgcgattcccaatggctgggggacagagtcatcaccaccagcacccgaacctgggccctgcccacctacaacaatcacctctacaagcaaatctccaacagcacatctggaggatcttcaaatgacaacgcctacttcggctacagcaccccctgggggtattttgacttcaacagattccactgccacttctcaccacgtgactggcagcgactcatcaacaacaactggggattccggcctaagcgactcaacttcaagctcttcaacattcaggtcaaagaggttacggacaacaatggagtcaagaccatcgccaataaccttaccagcacggtccaggtcttcacggactcagactatcagctcccgtacgtgctcgggtcggctcacgagggctgcctcccgccgttcccagcggacgttttcatgattcctcagtacgggtatctgacgcttaatgatggaagccaggccgtgggtcgttcgtccttttactgcctggaatatttcccgtcgcaaatgctaagaacgggtaacaacttccagttcagctacgagtttgagaacgtacctttccatagcagctacgctcacagccaaagcctggaccgactaatgaatccactcatcgaccaatacttgcactatctctcaaagactattaacggttctggacagaatcaacaaacgctaaaattcagtgtggccggacccagcaacatggctgtccagggaagaaactacatacctggacccagctaccgacaacaacgtgtctcaaccactgtgactcaaaacaacaacagcgaatttgcttggcctggagcttcttcttgggctctcaatggacgtaatagcttgatgaatcctggacctgctatggccagccacaaagaaggagaggaccgtttctttcctttgtctggatctttaatttttggcaaacaaggaactggaagagacaacgtggatgcggacaaagtcatgataaccaacgaagaagaaattaaaactactaacccggtagcaacggagtcctatggacaagtggccacaaaccaccagagtgcccaagcacaggcgcagaccggctgggttcaaaaccaaggaatacttccgggtatggtttggcaggacagagatgtgtacctgcaaggacccatttgggccaaaattcctcacacggacggcaactttcacccttctccgctgatgggagggtttggaatgaagcacccgcctcctcagatcctcatcaaaaacacacctgtacctgcggatcctccaacggccttcaacaaggacaagctgaactctttcatcacccagtattctactggccaagtcagcgtggagatcgagtgggagctgcagaaggaaaacagcaagcgctggaacccggagatccagtacacttccaactattacaagtctaataatgttgaatttgctgttaatactgaaggtgtatatagtgaaccccgccccattggcaccagatacctgactcgtaatctg

SEQ ID NO: 3004 - DNA, 2208 bp, Artificial Sequence
  Synthetic polynucleotide
atggctgccgatggttatcttccagattggctcgaggacaaccttagtgaaggaattcgcgagtggtgggctttgaaacctggagcccctcaacccaaggcaaatcaacaacatcaagacaacgctcgaggtcttgtgcttccgggttacaaataccttggacccggcaacggactcgacaagggggagccggtcaacgcagcagacgcggcggccctcgagcacgacaaggcctacgaccagcagctcaaggccggagacaacccgtacctcaagtacaaccacgccgacgccgagttccaggagcggctcaaagaagatacgtcttttgggggcaacctcgggcgagcagtcttccaggccaaaaagaggcttcttgaacctcttggtctggttgaggaagcggctaagacggctcctggaaagaagaggcctgtagagcagtctcctcaagaaccggactcctccgcgggtattggcaaatcgggtgcacagcccgctaaaaagagactcaatttcggtcagactggcgacacagagtcagtcccagaccctcaaccaatcggagaacctcccgcagccccctcaggtgtgggatctcttacaatggcttcaggtggtggcgcaccagtggcagacaataacgaaggtgccgatggagtgggtagttcctcgggaaattggcattgcgattcccaatggctgggggacagagtcatcaccaccagcacccgaacctgggccctgcccacctacaacaatcacctctacaagcaaatctccaacagcacatctggaggatcttcaaatgacaacgcctacttcggctacagcaccccctgggggtattttgacttcaacagattccactgccacttctcaccacgtgactggcagcgactcatcaacaacaactggggattccggcctaagcgactcaacttcaagctcttcaacattcaggtcaaagaggttacggacaacaatggagtcaagaccatcgccaataaccttaccagcacggtccaggtcttcacggactcagactatcagctcccgtacgtgctcgggtcggctcacgagggctgcctcccgccgttcccagcggacgttttcatgattcctcagtacgggtatctgacgcttaatgatggaagccaggccgtgggtcgttcgtccttttactgcctggaatatttcccgtcgcaaatgctaagaacgggtaacaacttccagttcagctacgagtttgagaacgtacctttccatagcagctacgctcacagccaaagcctggaccgactaatgaatccactcatcgaccaatacttgcactatctctcaaagactattaacggttctggacagaatcaacaaacgctaaaattcagtgtggccggacccagcaacatggctgtccagggaagaaactacatacctggacccagctaccgacaacaacgtgtctcaaccactgtgactcaaaacaacaacagcgaatttgcttggcctggagcttcttcttgggctctcaatggacgtaatagcttgatgaatcctggacctgctatggccagccacaaagaaggagaggaccgtttctttcctttgtctggatctttaatttttggcaaacaaggaactggaagagacaacgtggatgcggacaaagtcatgataaccaacgaagaagaaattaaaactactaacccggtagcaacggagtcctatggacaagtggccacaaaccaccagagtgcccaagcacaggcgcagaccggctgggttcaaaaccaaggaatacttccgggtatggtttggcaggacagagatgtgtacctgcaaggacccatttgggccaaaattcctcacacggacggcaactttcacccttctccgctgatgggagggtttggaatgaagcacccgcctcctcagatcctcatcaaaaacacacctgtacctgcggatcctccaacggccttcaacaaggacaagctgaactctttcatcacccagtattctactggccaagtcagcgtggagatcgagtgggagctgcagaaggaaaacagcaagcgctggaacccggagatccagtacacttccaactattacaagtctaataatgttgaatttgctgttaatactgaaggtgtatatagtgaaccccgccccattggcaccagatacctgactcgtaatctg

SEQ ID NO: 3005 - DNA, 2208 bp, Artificial Sequence
  Synthetic polynucleotide
  modified_base (1325)..(1325): a, c, g, or t
  misc_feature (1325)..(1325): n is a, c, g, or t
atggctgccgatggttatcttccagattggctcgaggacaaccttagtgaaggaattcgcgagtggtgggctttgaaacctggagcccctcaacccaaggcaaatcaacaacatcaagacaacgctcgaggtcttgtgcttccgggttacaaataccttggacccggcaacggactcgacaagggggagccggtcaacgcagcagacgcggcggccctcgagcacgacaaggcctacgaccagcagctcaaggccggagacaacccgtacctcaagtacaaccacgccgacgccgagttccaggagcggctcaaagaagatacgtcttttgggggcaacctcgggcgagcagtcttccaggccaaaaagaggcttcttgaacctcttggtctggttgaggaagcggctaagacggctcctggaaagaagaggcctgtagagcagtctcctcaggaaccggactcctccgcgggtattggcaaatcgggtgcacagcccgctaaaaagagactcaatttcggtcagactggcgacacagagtcagtcccagaccctcaaccaatcggagaacctcccgcagccccctcaggtgtgggatctcttacaatggcttcaggtggtggcgcaccagtggcagacaataacgaaggtgccgatggagtgggtagttcctcgggaaattggcattgcgattcccaatggctgggggacagagtcatcaccaccagcacccgaacctgggccctgcccacctacaacaatcacctctacaagcaaatctccaccagcacatctggaggatcttcaaatgacaacgcctacttcggctacagcaccccctgggggtattttgacttcaacagattccactgccacttctcaccacgtgactggcagcgactcatcaacaacaactggggattccggcctaagcgactcaacttcaagctcttcaacattcaggtcaaagaggttacggacaacaatggagtcaagaccatcgccaataaccttaccagcacggtccaggtcttcacggactcagactatcagctcccgtacgtgctcgggtcggctcacgagggctgcctcccgccgttcccagcggacgttttcatgattcctcagtacgggtatctgacgcttaatgatggaagccaggccgtgggtcgttcgtccttttactgcctggaatatttcccgtcgcaaatgctaagaacgggtaacaacttccagttcagctacgagtttgagaacgtacctttccatagcagctacgctcacagccaaagcctggaccgactaatgaatccactcatcgaccnatacttgcactatctctcaaagactattaacggttctggacagaatcaacaaacgctaaaattcagtgtggccggacccagcaacatggctgtccagggaagaaactacatacctggacccagctaccgacaacaacgtgtctcaaccactgtgactcaaaacaacaacagcgaatttgcttggcctggagcttcttcttgggctctcaatggacgtaatagcttgatgaatcctggacctgctatggccagccacaaagaaggagaggaccgtttctttcctttgtctggatctttaatttttggcaaacaaggaactggaagagacaacgtggatgcggacaaagtcatgataaccaacgaagaagaaattaaaactactaacccggtagcaacggagtcctatggacaagtggccacaaaccaccagagtgcccaagcacaggcgcagaccggctgggttcaaaaccaaggaatacttccggatatggtttggcaggacagagatgtgtacctgcaaggacccatttgggccaaaattcctcacacggacggcaactttcacccttctccgctgatgggagggtttggaatgaagcacccgcctcctcagatcctcatcaaaaacacacctgtacctgcggatcctccaacggccttcaacaaggacaagctgaactctttcatcacccagtattctactggccaagtcagcgtggagatcgagtgggagctgcagaaggaaaacagcaagcgctggaacccggagatccagtacacttccaactattacaagtctaataatgttgaatttgctgttaatactgaaggtgtatatagtgaaccccgccccattggcaccagatacctgactcgtaatctg

SEQ ID NO: 3006 - DNA, 2208 bp, Artificial Sequence
  Synthetic polynucleotide
atggctgccgatggttatcttccagattggctcgaggacaaccttagtgaaggaattcgcgagtggtgggctttgaaacctggagcccctcaacccaaggcaaatcaacaacatcaagacaacgctcgaggtcttgtgcttccgggttacaaataccttggacccggcaacggactcgacaagggggagccggtcaacgcagcagacgcggcggccctcgagcacgacaaggcctacgaccagcagctcaaggccggagacaacccgtacctcaagtacaaccacgccgacgccgagttccaggagcggctcaaagaagatacgtcttttgggggcaacctcgggcgagcagtcttccaggccaaaaagaggcttcttgaacctcttggtctggttgaggaagcggctaagacggctcctggaaagaagaggcctgtagagcagtctcctcaggaaccggactcctccgcgggtattggcaaatcgggtgcacagcccgctaaaaagagactcaatttcggtcagactggcgacacagagtcagtcccagaccctcaaccaatcggagaacctcccgcagccccctcaggtgtgggatctcttacaatggcttcaggtggtggcgcaccagtggcagacaataacgaaggtgccgatggagtgggtagttcctcgggaaattggcattgcgattcccaatggctgggggacagagtcatcaccaccagcacccgaacctgggccctgcccacctacaacaatcacctctacaagcaaatctccaacagcacatctggaggatcttcaaatgacaacgcctacttcggctacagcaccccctgggggtattttgacttcaacagattccactgccacttctcaccacgtgactggcagcgactcatcaacaacaactggggattccggcctaagcgactcaacttcaagctcttcaacattcaggtcaaagaggttacggacaacaatggagtcaagaccatcgccaataaccttaccagcacggtccaggtcttcacggactcagactatcagctcccgtacgtgctcgggtcggctcacgagggctgcctcccgccgttcccagcggacgttttcatgattcctcagtacgggtatctgacgcttaatgatggaagccaggccgtgggtcgttcgtccttttactgcctggaatatttcccgtcgcaaatgctaagaacgggtaacaacttccagttcagctacgagtttgagaacgtacctttccatagcagctacgctcacagccaaagcctggaccgactaatgaatccactcatcgaccaatacttgcactatctctcaaagactattaacggttctggacagaatcaacaaacgctaaaattcagtgtggccggacccagcaacatggctgtccagggaagaaactacatacctggacccagctaccgacaacaacgtgtctcaaccactgtgactcaaaacaacaacagcgaatttgcttggcctggagcttcttcttgggctctcaatggacgtaatagcttgatgaatcctggacctgctatggccagctacaaagaaggagaggacagtttctttcctttgtctggatctttaatttttggcaaacaaggaactggaagagacaacgtggatgcggacaaagtcatgataaccaacgaagaagaaattaaaactactaacccggtagcaacggagtcctatggacaagtggccacaaaccaccagagtgcccaagcacaggcgcagaccggctgggttcaaaaccaaggaatacttccgggtatggtttggcaggacagagatgtgtacctgcaaggacccatttgggccaaaattcctcacacggacggcaactttcacccttctccgctgatgggagggtttggaatgaagcacccgcctcctcagaccctcatcaaaaacacacctgtacctgcggatcctccaacggccttcaacaaggacaagctgaactctttcatcacccagtattctactggccaagtcagcgtggagatcgagtgggagctgcagaaggaaaacagcaagcgctggaacccggagatccagtacacttccaactattacaagtctaataatgttgaatttgctgttaatactgaaggtgtatatagtgaaccccgccccattggcaccagatacctgactcgtaatctg

SEQ ID NO: 3007 - DNA, 2208 bp, Artificial Sequence; identical to SEQ ID NO: 2990
  Synthetic polynucleotide

SEQ ID NO: 3008 - DNA, 2208 bp, Artificial Sequence
  Synthetic polynucleotide
atggctgccgatggttatcttccagattggctcgaggacaaccttagtgaaggaattcgcgagtggtgggctttgaaacctggagcccctcaacccagggcaaatcaacaacatcaagacaacgctcgaggtcttgtgcttccgggttacaaataccttggacccggcaacggactcgacaagggggagccggtcaacgcagccgacgcggcggccctcgagcacgacaaggcctacgaccagcagctcaaggccggagacaacccgtacctcaagtacaaccacgccgacgccgagttccaggagcggctcaaagaagatacgtcttttgggggcaacctcgggcgagcagtcttccaggccaaaaagaggcttcttgaacctcttggtctggttgaggaagcggctaagacggctcctggaaagaagaggcctgtagagcagtctcctcaggaaccggactcctccgcgggtattggcaaatcgggtgcacagcccgctaaaaagagactcaatttcggtcagactggcgacacagagtcagtcccagaccctcaaccaatcggagaacctcccgcagccccctcaggtgtgggatctcttacaatggcttcaggtggtggcgcaccagtggcagacaataacgaaggtgccgatggagtgggtagttcctcgggaaattggcattgcgattcccaatggctgggggacagagtcatcaccaccagcacccgaacctgggccctgcccacctacaacaatcacctctacaagcaaatctccaacagcacatctggaggatcttcaaatgacaacgcctacttcggctacagcaccccctgggggtattttgacttcaacagattccactgccacttctcaccacgtgactggcagcgactcatcaacaacaactggggattccggcctaagcgactcaacttcaagctcttcaacattcaggtcaaagaggttacggacaacaatggagtcaagaccatcgccaataaccttaccagcacggtccaggtcttcacggactcagactgtcagctcccgtacgtgctcgggtcggctcacgagggctgcctcccgccgttcccagcggacgttttcatgattcctcagtacgggtatctgacgcttaatgatggaagccaggccgtgggtcgttcgtccttttactgcctggaatatttcccgtcgcaaatgctaagaacgggtaacaacttccagttcagctacgagtttgagaacgtacctttccatagcagctacgctcacagccaaagcctggaccgactaacgaatccactcatcgaccaatacttgtactatctctcaaagactattaacggttctggacagaatcaacaaacgctaaaattcagtgtggccggacccagcaacatggctgtccagggaagaaactacatacctggacccagctaccgacaacaacgtgtctcaaccactgtgactcaaaacaacaacagcgaatttgcttggcctggagcttcttcttgggctctcaatggacgtaatagcttgatgaatcctggacctgctatggccagccacaaagaaggagaggaccgtttctttcctttgtctggatctttaatttttggcaaacaaggaactggaagagacaacgtggatgcggacaaagtcatgataaccaacgaagaagaaattaaaactactaacccggtagcaacggagtcccatggacaagtggccacaaaccaccagagtgcccaagcacaggcgcagaccggctgggttcaaaaccaaggaatacttccgggtatggtttggcaggacagagatgtgtacctgcaaggacccatttgggccaaaattcctcacacggacggcaactttcacccttctccgctgatgggagggtttggaatgaagcacccgcctcctcagatcctcatcaaaaacacacctgtacctgcggatcctccaacggccttcaacaaggacaagctgaactctttcatcacccagtattctactggccaagtcagcgtggagatcgagtgggagctgcagaaggaaaacagcaagcgctggaacccggagatccagtacacttccaactattacaagtctaataatgttgaatttgctgttaatactgaaggtgtatatagtgaaccccgccccattggcaccagatacctgactcgtaatctg

SEQ ID NO: 3009 - DNA, 2208 bp, Artificial Sequence
  Synthetic polynucleotide
atggctgccgatggttatcttccagattggctcgaggacaaccttagtgaaggaattcgcgagtggtgggctttgaaacctggagcccctcaacccaaggcaaatcaacaacatcaagacaacgctcgaggtcttgtgcttccgggttacaaataccttggacccggcaacggactcgacaagggggagccggtcaacgcagcagacgcggcggccctcgagcacgacaaggcctacgaccagcagctcaaggccggagacaacccgtacctcaagtacaaccacgccgacgccgagttccaggagcggctcaaagaagatacgtcttttgggggcaacctcgggcgagcagtcttccaggccaaaaagaggcttcttgaacctcttggtctggttgaggaagcggctaagacggctcctggaaagaagaggcctgtagagcagtctcctcaggaaccggactcctccgcgggtattggcaaatcgggtgcacagcccgctaagaagagactcaatttcggtcagactggcgacacagagtcagtcccagaccctcaaccaatcggagaacctcccgcagccccctcaggtgtgggatctcttacaatggcttcaggtggtggcgcaccagtggcagacaataacgaaggtgccgatggagtgggtagttcctcgggaaattggcattgcgattcccaatggctgggggacagagtcatcaccaccagcacccgaacctgggccctgcccacctacaacaatcacctctacaagcaaatctccaacagcacatctggaggatcttcaaatgacaacgcctacttcggctacagcaccccctgggggtattttgacttcaacagattccactgccacttctcaccacgtgactggcagcgactcatcaacaacaactggggattccggcctaagcgactcaacttcaagctcttcaacattcaggtcaaagaggttacggacaacaatggagtcaagaccatcgccaataaccttaccagcacggtccaggtcttcacggactcagactatcagctcccgtacgtgctcgggtcggctcacgagggctgcctcccgccgttcccagcggacgttttcatgattcctcagtacgggtatctgacgcttaatgatggaagccaggccgtgggtcgttcgtccttttactgcctggaatatttcccgtcgcaaatgctaagaacgggtaacaacttccagttcagctacgagtttgagaacgtacctttccatagcagctacgctcacagccaaagcctggaccgactaatgaatccacccatcgaccaatacttgtactatctctcaaagactattaacggttctggacagaatcaacaaacgctaaaattcagtgtggccggacccagcaacatggctgtccagggaagaaactacatacctggacccagctaccgacaacaacgtgtctcaaccactgtgactcaaaacaacaacagcgaatttgcttggcctggagcttcttcttgggctctcaatggacgtaatagcttgatgaatcctggacctgctatggccagccacaaagaaggagaggaccgtttctttcctttgtctggatctttaatttttggcaaacaaggaactggaagagacaacgtggatgcggacaaagtcatgataaccaacgaagaagaaattaaaactactaacccggtagcaacggagtcctatggacaagtggccacaaaccaccagagtgcccaagcacaggcgcagaccggctgggttcaaaaccaaggaatacttccgggtatggtttggcaggacagagatgtgtacctgcaaggacccatttgggccaaaattcctcacacggacggcaactttcacccttctccgctgatgggagggtttggaatgaagcacccgcctcctcagatcctcatcaaaaacacacctgtacctgcggatcctccaacggccttcaacaaggacaagctgaactctttcatcacccagtattctactggccaagtcagcgtggagatcgagtgggagctgcagaaggaaaacagcaagcgctggaacccggagatccagtacacttccaactattacaagtctaataatgttgaatttgctgttaatactgaaggtgtatatggtgaaccccgccccattggcaccagatacctgactcgtaatctg

SEQ ID NO: 3010 - DNA, 2208 bp, Artificial Sequence
  Synthetic polynucleotide
atggctgccgatggttatcttccagattggctcgaggacaaccttagtgaaggaattcgcgagtggtgggctttgaaacctggagcccctcaacccaaggcaaatcaacaacatcaagacaacgctcgaggtcttgtgcttccgggttacaaataccttggacccggcaacggactcgacaagggggagccggtcaacgcagcagacgcggcggccctcgagcacgacaaggcctacgaccagcagctcaaggccggagacaacccgtacctcaagtacaaccacgccgacgccgagttccaggagcggctcaaagaagatacgtcttttgggggcaacctcgggcgagcagtcttccaggccaaaaagaggcttcttgaacctcttggtctggttgaggaagcggctaagacggctcctggaaagaagaggcctgtagagcagtctcctcaggaaccggactcctccgcgggtattggcaaatcgggtgcacagcccgctaaaaagagactcaatttcggtcagactggcgacacagagtcagtcccagaccctcaaccaatcggagaacctcccgcagccccctcaggtgtgggatctcttacaatggcttcaggtggtggcgcaccagtggcagacaataacgaaggtgccgatggagtgggtagttcctcgggaaattggcattgcgattcccaatggctgggggacagagtcatcaccaccagcacccgaacctgggccctgcccacctacaacaatcacctctacaagcaaatctccaacagcacatctggaggatcttcaaatgacaacgcctacttcggctacagcaccccctgggggtattttgacttcaacagattccactgccacttctcaccacgtgaccggcagcgactcatcaacaacaactggggattccggcctaagcgactcaacttcaagctcttcaacattcaggtcaaagaggttacggacaacaatggagtcaagaccatcgccaataaccttaccagcacggtccaggtcttcacggactcagactatcagctcccgtacgtgctcgggtcggctcacgagggctgcctcccgccgttcccagcggacgttttcatgattcctcagtacgggtatctgacgcttaatgatggaagccaggccgtgggtcgttcgtccttttactgcctggaatatttcccgtcgcaaatgctaagaacgggtaacaacttccagttcagctacgagtttgagaacgtacctttccatagcagctacgctcacagccaaagcctggaccgactaatgaatccactcatcgaccaatacttgtactatctctcaaagactattaacggttctggacagaatcaacaaacgctaaaattcagtgtggccggacccagcaacatggctgtccagggaagaaactacatacctggacccagctaccgacaacaacgtgtctcaaccactgtgactcaaaacaacaacagcgaatttgcttggcctggagcttcttcttgggctctcaatggacgtaatagcttgatgaatcctggacctgctatggccagccacaaagaaggagaggaccgtttctttcctttgtctggatctttaatttttggcaaacaaggaactggaagagacaacgtggatgcggacaaagtcatgataaccaacgaagaagaaattaaaactactaacccggtagcaacggagtcctatggacaagtggccacaaaccaccagagtgcccaagcacaggcgcagaccggctgggttcaaaaccaaggaatacttccgggtatggtttggcaggacagagatgtgtacctgcaaggacccatttgggccaaaattcctcacacggacggcaactttcacccttctccgctgatgggagggtttggaatgaagcacccgcctcctcagatcctcatcaaaaacacacctgtacctgcggatcctccaacggccttcaacaaggacaagctgaactctttcatcacccagtattctactggccaagtcagcgtggagatcgagtgggagctgcagaaggaaaacagcaagcgctggaacccggagatccagtacacttccaactattacaagtctaataatgttgaatttgctgttaatactgaaggtgtatatagtgaaccccgccccattggcaccagatacctgactcgtaatctg

SEQ ID NO: 3011 - DNA, 2208 bp, Artificial Sequence
  Synthetic polynucleotide
atggctgccgatggttatcttccagattggctcgaggacaaccttagtgaaggaattcgcgagtggtgggctttgaaacctggagcccctcaacccaaggcaaatcaacaacatcaagacaacgctcgaggtcttgtgcttccgggttacaaataccttggacccggcaacggactcgacaagggggagccggtcaacgcagcagacgcggcagccctcgagcacgacaaggcctacgaccagcagctcaaggccggagacaacccgtacctcaagtacaaccacgccgacgccgagttccaggagcggctcaaagaagatacgtcttttgggggcaacctcgggcgagcagtcttccaggccaaaaagaggcttcttgaacctcttggtctggttgaggaagcggctaagacggctcctggaaagaagaggcctgtagagcagtctcctcaggaaccggactcctccgcgggtattggcaaatcgggtgcacagcccgctaaaaagagactcaatttcggtcagactggcgacacagagtcagtcccagaccctcaaccaatcggagaacctcccgcagccccctcaggtgtgggatctcttacaatggcttcaggtggtggcgcaccagtggcagacaataacgaaggtgccgatggagtgggtagttcctcgggaaattggcattgcaattcccaatggctgggggacagagtcatcaccaccagcacccgaacctgggccctgcccacctacaacaatcacctctacaagcaaatctccaacagcacatctggaggatcttcaaatgacaacgcctacttcggctacagcaccccctgggggtattttgacttcaacagattccactgccacttctcaccacgtgactggcagcgactcatcaacaacaactggggattccggcctaagcgactcaacttcaagctcttcaacattcaggtcaaagaggttacggacaacaatggagtcaagaccatcgccaataaccttaccagcacggtccaggtcttcacggactcagactatcagctcccgtacgtgctcgggtcggctcacgagggctgcctcccgccgttcccagcggacgttttcatgattcctcagtacgggtatctgacgcttaatgatggaagccaggccgtgggtcgttcgtccttttactgcctggaatatttcccgtcgcaaatgctaagaacgggtaacaacttccagttcagctacgagtttgagaacgtacctttccatagcagctacgctcacagccaaagcctggaccgactaatgaatccactcatcgaccaatacttgtactatctctcaaagactattaacggttctggacagaatcaacaaacgctaaaattcagtgtggccggacccggcaacatggctgtccagggaagaaactacatacctggacccagctaccgacaacaacgtgtctcaaccactgtgactcaaaacaacaacagcgaatttgcttggcctggagcttcttcttgggctctcaatggacgtaatagcttgatgaatcctggacctgctatggccagccacaaagaaggagaggaccgtttctttcctttgtctggatctttaatttttggcaaacaaggaactggaagagacaacgtggatgcggacaaagtcatgataaccaacgaagaagaaattaaaactactaacccggtagcaacggagtcctatggacaagtggccacaaaccaccagagtgcccaagcacaggcgcagaccggctgggttcaaaaccaaggaatacttccgggtatggtttggcaggacagagatgtgtacctgcaaggacccatttgggccaaaattcctcacacggacggcaactttcacccttctccgctgatgggagggtttggaatgaagcacccgcctcctcagatcctcatcaagaacacacctgtacctgcggatcctccaacggccttcaacaaggacaagctgaactctttcatcacccagtattctactggccaagtcagcgtggagatcgagtgggagctgcagaaggaaaacagcaagcgctggaacccggagatccagtacacttccaactattacaagtctaataatgttgaatttgctgttaatactgaaggtgtatatagtgaaccccgccccattggcaccagatacctgactcgtaatctg

SEQ ID NO: 3012 - DNA, 2208 bp, Artificial Sequence
  Synthetic polynucleotide
atggctgccgatggttatcttccagattggctcgaggacaaccttagtgaaggaattcgcgagtggtgggctttgaaacctggagcccctcaacccaaggcaaatcaacaacatcaagacaacgctcgaggtcttgtgcttccgggttacagataccttggacccggcaacggactcgacaagggggagccggtcaacgcagcagacgcggcggccctcgagcacgacaaggcctacgaccagcagctcaaggccggagacaacccgtacctcaagtacaaccacgccgacgccgagttccaggagcggctcaaagaagatacgtcttttgggggtaacctcgggcgagcagtcttccaggccaaaaagaggcttcttgaacctcttggtctggttgaggaagcggctaagacggctcctggaaagaagaggcctgtagagcagtctcctcaggaaccggactcctccgcgggtatcggcaaatcgggtgcacagcccgctaaaaagagactcaatttcggtcagactggcgacacagagtcagtcccagaccctcaaccaatcggagaacctcccgcagccccctcaggtgtgggatctcttacaatggcttcaggtggtggcgcaccagtggcagacaataacgaaggtgccgatggagtgggtagttcctcgggaaattggcattgcgattcccaatggctgggggacagagtcatcaccaccagcacccgaacctgggccctgcccacctacaacaatcacctctacaagcaaatctccaacagcacatctggaggatcttcaaatgacaacgcctacttcggctacagcaccccctgggggtattttgacttcaacagattccactgccacttctcaccacgtgactggcagcgactcatcaacaacaactggggattccggcctaagcgactcaacttcaagctcttcaacattcaggtcaaagaggttacggacaacaatggagtcaagaccgtcgccaataaccttaccagcacggtccaggtcttcacggactcagactatcagctcccgtacgtgctcgggtcggctcacgagggctgcctcccgccgttcccagcggacgttttcatgattcctcagtacgggtatctgacgcttaatgatggaagccaggccgtgggtcgttcgtccttttactgcctggaatatttcccgtcgcaaatgctaagaacgggtaacaacttccagttcagctacgagtttgagaacgtacctttccatagcagctacgctcacagccaaagcctggaccgactaatgaatccactcatcgaccaatacttgtactatctctcaaagactattaacggttctggacagaatcaacaaacgctaaaattcagtgtggccggacccagcaacatggctgtccagggaagaaactacatacctggacccagctaccgacaacaacgtgtctcaaccactgtgactcaaaacaacaacagcgaatttgcttggcctggagcttcttcttgggctctcaatggacgtaatagcttgatgaatcctggacctgctatggccagccacaaagaaggagaggaccgtttctttcctttgtctggatctttaatttttggcaaacaaggaactggaagagacaacgtggatgcggacaaagtcatgataaccaacgaagaagaaattaaaactactaacccggtagcaacggagtcctatggacaagtggccacaaaccaccagagtgcccaagcacaggcgcagaccggctgggttcaaaaccaaggaatacttccgggtatggtttggcaggacagagatgtgtacctgcaaggacccatttgggccaaaattcctcacacggacggcaactttcacccttctccgctgatgggagggtttggaatgaagcacccgcctcctcagatcctcatcaaaaacacacctgtacctgcggatcctccaacggccttcaacaaggacaagctgaactctttcatcacccagtattctactggccaagtcagcgtggagatcgagtgggagctgcagaaggaaaacagcaagcgctggaacccggagatccagtacacttccaactattacaagtctaataatgttgaatttgctgttaatactgaaggtgtatatagtggaccccgccccattggcaccagatacctgactcgtaatctg

SEQ ID NO: 3013 - DNA, 2208 bp, Artificial Sequence
  Synthetic polynucleotide
atggctgccgatggttatcttccagattggctcgaggacaaccttagtgaaggaattcgcgagtggtgggctttgaaacctggagcccctcaacccaaggcaaatcaacaacatcaagacaacgctcgaggtcttgtgcttccgggttacaaataccttggacccggcaacggactcgacaagggggagccggtcaacgcagcagacgcggcggccctcgagcacgacaaggcctacgaccagcagctcaaggccggagacaacccgtacctcaagtacaaccacgccgacgccgagttccaggagcggctcaaagaagatacgtcttttgggggcaacctcgggcgagcagtcttccaggccaaaaagaggcttcttgaacctcttggtctggttgaggaagcggctaagacggctcctggaaagaagaggcctgtagagcagtctcctcaggaaccggactcctccgcgggtattggcaaatcgggtgcacagcccgctaaaaagagactcaatttcggtcagactggcgacacagagtcagtcccagaccctcaaccaatcggagaacctcccgcagccccctcaggtgtgggatctcttacaatggcttcaggtggtggcgcaccagtggcagacaataacgaaggtgccgatggagtgggtagttcctcgggaaattggcattgcgattcccaatggctgggggacagagtcatcaccaccagcacccgaacctgggccctgcccacctacaacaatcacctctacaagcaaatctccaacagcacatctggaggatcttcaaatgacaacgcctacttcggctacagcaccccctgggggtattttgacttcaacagattccactgccacttctcaccacgtgactggcagcgactcatcaacaacaactggggattccggcctaagcgactcaacttcaagctcttcaacattcaggtcaaagaggttacggacaacaatggagtcaagaccatcgccaataaccttaccagcacggtccaggtcttcacggactcagactatcagctcccgtacgtgctcgggtcggctcacgagggctgcctcccgccgttcccagcggacgttttcatgattcctcagtacgggtatctgacgcttaatgatggaagccaggccgtgggtcgttcgtccttttactgcctggaatatttcccgtcgcaaatgctaagaacgggtaacaacttccagttcagctacgagtttgagaacgtacctttccatagcagctacgctcacagccaaagcctggaccgactaatgaatccactcatcgaccaatacttgtactatctctcaaagactattaacggttctggacagaatcaacaaacgctaaaattcagtgtggccggacccagcaacatggctgtccagggaagaaactacatacctggacccagctaccgacaacaacgtgtctcaaccactgtgactcaaaacaacaacagcgaatttgcttggcctggagcttcttcttgggctctcaatggacgtaatagcttgatgaatcctggacctgctatggccagccacaaagaaggagaggaccgtttctttcctttgtctggatctttaatttttggcaaacaaggaactggaagagacaacgtggatgcggacaaagtcatgataaccaacgaagaagaaattaaaactactaacccggtagcaacggagtcctatggacaagtggccacaaaccaccagagtgcccaagcacaggcgcagaccggctgggttcaaaaccaaggaatacttccgggtatggtttggcaggacagagatgtgtacctgcaaggacccatttgggccaaaattcctcacacggacggcaactttcacccttctccgctgatgggagggtttggaatgaagcacccgcctcctcagatcctcatcaaaaacacacctgtacctgcggatcctccaacggccttcaacaaggacaagctgaactctttcatcacccagtattctactggccaagtcagcgtggagatcgagtgggagctgcagaaggaaaacagcaagcgctggaacccggagatccagtacacttccaactattacaagtctaataatgttgaatttgctgttaatactgaaggtgtatatagtgaaccccgccccattggcaccagatacctgactcgtaatctg

SEQ ID NO: 3014 - DNA, 2208 bp, Artificial Sequence
  Synthetic polynucleotide
atggctgccgatggttatcttccagattggctcgaggacaaccttagtgaaggaattcgcgagtggtgggctttgaaacctggagcccctcaacccaaggcaaatcaacaacgtcaagacaacgctcgaggtcttgtgcttccgggttacaaataccttggacccggcaacggactcgacaagggggagccggtcaacgcagcagacgcggcggccctcgagcacgacaaggcctacgaccagcagctcaaggccggaggcaacccgtgcctcaagtacaaccacgccgacgccgagttccaggagcggctcaaagaagatacgtcttttgggggcaacctcgggcgagcagtcttccaggccaaaaagaggcttcttgaacctcttggtctggttgaggaagcggctaagacggctcctggaaagaagaggcctgtagagcagtctcctcaggaaccggactcctccgcgggtattggcagatcgggtgcacagcccgctaaaaagagactcaatttcggtcagactggcgacacagagtcagtcccagaccctcaaccaatcggagaacctcccgcagccccctcaggtgtgggatctcttacaatggcttcaggtggtggcgcaccagtggcagacaataacgaaggtgccgatggagtgggtagttcctcgggaaattggcattgcgattcccaatggctgggggacagagtcatcaccaccagcacccgaacctgggccctgcccacctacaacaatcacctctacaagcaaatctccaacagcacatctggaggatcttcaaatgacaacgcctacttcggctacagcaccccctgggggtattttgacttcaacagattccactgccacttctcaccacgtgactggcagcgactcatcaacaacaactggggattccggcctaagcgactcaacttcaagctcttcaacattcaggtcaaagaggttacggacaacaatggagtcaaggccatcgccaataaccttaccagcacggtccaggtcttcacggactcagactatcagctcccgtacgtgctcgggtcggctcacgagggctgcctcccgccgttcccagcggacgttttcatgattcctcagtacgggtatctgacgcttaatgatggaagccaggccgtgggtcgttcgtccttttactgcctggaatatttcccgtcgcaaatgctaagaacgggtaacaacttccagttcagctacgagtttgagaacgtacctttccatagcagctacgctcacagccaaagcctggaccgactaatgaatccactcatcgaccaatacttgtactatctctcaaagactattgacggttctggacagaatcaacaaacgctaaaattcagtgtggccggacccagcaacatggctgtccagggaagaaactacatacctggacccagctaccgacaacaacgtgtctcaaccactgtgactcaaaacaacaacagcgaatttgcttggcctggagcttcttcttgggctctcaatggacgtaatagcttgatggatcctggacctgctatggccagccacaaagaaggagaggaccgtttctttcctttgtctggatctttaatttttggcaaacaaggaactggaagagacaacgtggatgcggacaaagtcatgataaccaacgaagaagaaattaaaactactaacccggtagcaacggagtcctatggacaagtggccacaaaccaccagagtgcccaagcacaggcgcagaccggctgggttcaaaaccaaggaatacttccgggtatggtttggcaggacagagatgtgtacctgcaaggacccatttgggccaaaattcctcacacgggcggcaactttcacccttctccgctgatgggagggtttggaatgaagcacccgcctcctcagatcctcatcaaaaacacacctgtacctgcggatcctccaacggccttcaacaaggacaagctgaactctttcatcacccagtattctactggccaagtcagcgtggagatcgagtgggagctgcagaaggaaaacagcaagcgctggaacccggagatccagtacacttccaactattacaagtctaataatgttgaatttgctgttaatactgaaggtgtatatagtgaaccccgccccattggcaccagatacctgactcgtaatctg

SEQ ID NO: 3015 - DNA, 2208 bp, Artificial Sequence
  Synthetic polynucleotide
atggctgccgatggttatcttccagattggctcgaggacaaccttagtgaaggaattcgcgagtggtgggctttgaaacctggagcccctcaacccaaggcaaatcaacaacatcaagacaacgctcgaggtcttgtgcttccgggttacaaataccttggacccggcaacggactcgacaagggggagccggtcaacgcagcagacgcggcggccctcgagcacgacaaggcctacgaccagcagctcaaggccggagacaacccgtacctcaagtacaaccacgccgacgccgagttccaggagcggctcaaagaagatacgtcttttgggggcaacctcgggcgagcagtcttccaggccaaaaagaggcttcttgaacctcttggtctggttgaggaagcggctaagacggctcctggaaagaagaggcctgtagagcagtctcctcaggaaccggactcctccgcgggtattggcaaatcgggtgcacagcccgctaaaaagagactcaatttcggtcagactggcgacacagagtcagtcccagaccctcaaccaatcggagaacctcccgcagccccctcaggtgtgggatctcttacaatggcttcaggtggtggcgcaccagtggcagacaataacgaaggtgccgatggagtgggtagttcctcgggaaattggcattgcgattcccaatggctgggggacagagtcatcaccaccagcacccgaacctgggccctgcccacctacaacaatcacctctacaagcaaatctccaacagcacatctggaggatcttcaaatgacaacgcctacttcggctacagcaccccctgggggtattttgacttcaacagattccactgccacttctcaccacgtgactggcagcgactcatcaacaacaactggggattccggcctaagcgactcaacttcaagctcttcaacattcaggtcaaagaggttacggacaacaatggagtcaagaccatcgccaataaccttaccagcacggtccaggtcttcacggactcagactatcagctcccgtacgtgctcgggtcggctcacgagggctgcctcccgccgttcccagcggacgttttcatgattcctcagtacgggtatctgacgcttaatgatggaagccaggccgtgggtcgttcgtccttttactgcctggaatatttcccgtcgcaaatgctaagaacgggtaacaacttccagttcagctacgagtttgagaacgtacctttccatagcagctacgctcacagccaaagcctggaccgactaatgaatccactcatcgaccaatacttgtactatctctcaaagactattaacggttctggacagaatcaacaaacgctaaaattcagtgtggccggacccagcaacatggctgtccagggaagaaactacatacctggacccagctaccgacaacaacgtgtctcaaccactgtgactcaaaacaacaacagcgaatttgcttggcctggagcttcttcttgggctctcaatggacgtaatagcttgatgaatcctggacctgctatggccagccacaaagaaggagaggaccgtttctttcctttgtctggatctttaatttttggcaaacaaggaactggaagagacaacgtggatgcggacaaagtcatgataaccaacgaagaagaaattaaaactactaacccggtagcaacggagtcctatggacaagtggccacaaaccaccagagtgcccaagcacaggcgcagaccggctgggttcaaaaccaaggaatacttccgggtatggtttggcaggacagagatgtgtacctgcaaggacccatttgggccaaaattcctcacacggacggcaactttcacccttctccgctgatgggagggtttggaatgaagcacccgcctcctcagatcctcatcaaaaacacacctgtacctgcggatcctccaacggccttcaacaaggacaagctgaactctttcatcacccagtattctactggccaagtcagcgtggagatcgagtgggagctgcagaaggaaaacagcaagcgctggaacccggagatccagtacacttccaactattacaagcctaataatgttgaatttgctgttaatactgaaggtgtatatagtgaaccccgccccattggcaccagatacctgactcgtaatctg

SEQ ID NO: 3016 - DNA, 2208 bp, Artificial Sequence
  Synthetic polynucleotide
atggctgccgatggttatcttccagattggctcgaggacaaccttagtgaaggaattcgcgagtggtgggctttgaaacctggagcccctcaacccaaggcaaatcaacaacatcaagacaacgctcgaggtcttgtgcttccgggttacaaataccttggacccggcaacggactcgacaagggggagccggtcaacgcagcagacgcggcggccctcgagcacaacaaggcctacgaccagcagctcaaggccggagacaacccgtacctcaagtgcaaccacgccgacgccgagttccaggagcggctcaaagaagatacgtcttttgggggcaacctcgggcgagcagtcttccaggccaaaaagaggcctcttgaacctcttggtctggttgaggaagcggctaagacggctcctggaaagaagaggcctgtagagcagtctcctcaggaaccggactcctccgcgggtattggcaaatcgggtgcacagcccgctaaaaagagactcaatttcggtcagactggcgacacagagtcagtcccagaccctcaaccaatcggagaacctcccgcagccccctcaggtgtgagatctcttacaatggcttcaggtggtggcgcaccagtggcagacaataacgaaggtgccgatggagtgggtagttcctcgggaaattggcattgcgattcccaatggctgggggacagagtcatcaccaccagcacccgaacctgggccctgcccacctacaacaatcacctctacaagcaaatctccaacagcacatctggaggatcttcaaatgacaacgcctacctcggctacagcaccccctgggggtattttgacttcaacagattccactgccacttctcaccacgtgactggcagcgactcatcaacaacaactggggattccggcctaagcgactcaacttcaagctcttcaacattcaggtcaaagaggttacggacaacaatggagtcaagaccatcgccaataaccttaccagcacggtccaggtcttcacggactcagactatcagctcccgtacgtgctcgggtcggctcacgagggctgcctcccgccgttcccagcggacgttttcatgattcctcagtacgggtatctgacgcttaatgatggaagccaggccgtgggtcgttcgtccttttactgcctggaatatttcccgtcgcaaatgctaagaacgggtaacaacttccagttcagctacgagtttgagaacgtacctttccatagcagctacgctcacagccaaagcctggaccgactaatgaatccactcatcgaccaatacttgtactatctctcaaagactattaacggttctggacagaatcaacaaacgctaaaattcagtgtggccggacccagcaacatggctgtccagggaagaaactacatacctggacccagctaccgacaacaacgtgtctcaaccactgtgactcaaaacaacaacagcgaatttgcttggcctggagcttcttcttgggctctcaatggacgtaatagcttgatgaatcctggacctactatggccagccacaaagaaggagaggaccgtttctttcctttgtctggatctttaatttttggcaaacaaggaactggaagagacaacgtggatgcggacaaagtcatgataaccaacgaagaagaaattaaaactactaacccggtagcaacggagtcctatggacaagtggccacaaaccaccagagtgcccaagcacaggcgcagaccggctgggttcaaaaccaaggaatacttccgggtatggtttggcaggacagagatgtgtacctgcaaggacccatttgggccaaaattcctcacacggacggcaactttcacccttctccgctgatgggagggtttggaatgaagcacccgcctcctcagatcctcatcaaaaacacacctgtacctgcggatcctccaacggccttcaacaaggacaagctgaactctttcatcacccagtattctactggccaagtcagcgtggagatcgagtgggagctgcagaaggaaaacagcaagcgctggaacccggagatccagtacacttccaactattacaagtctaataatgttgaatttgctgttaatactgaaggtgtatatagtgaaccccgccccattggcaccagatacctgactcgtaatctg

SEQ ID NO: 3017 - DNA, 2208 bp, Artificial Sequence
  Synthetic polynucleotide
atggctgccgatggttatcttccagattggctcgaggacaaccttagtgaaggaattcgcgagtggtgggctttgaaacctggagcccctcaacccaaggcaaatcaacaacatcaagacaacgctcgaggtcttgtgcttccgggttacaaataccttggacccggcaacggactcgacaagggggagccggtcaacgcagcagacgcggcggccctcgtgcacgacaaggcctacgaccagcagctcaaggccggagacaacccgtacctcaagtgcaaccacgccgacgccgagttccaggagcggctcaaagaagatacgtcttttgggggcaacctcgggcgagcagtcttccaggccaaaaagaggcttcttgaacctcttggtctggttgaggaagcggctaagacggctcctggaaagaagaggcctgtagagcagtctcctcaggaaccggactcctccgcgggtattggcaaatcgggtgcacagcccgctaaaaagagactcaatttcggtcagactggcgacacagagtcagtcccagaccctcaaccaatcggagaacctcccgcagccccctcaggtgtgggatctcttacaatggcttcaggtggtggcgcaccagtggcagacaataacgaaggtgccgatggagtgggtagttcctcgggaaattggcattgcgattcccaatggctgggggacagagtcatcaccaccagcacccgaacctgggccctgcccacctacaacaatcacctctacaagcaaatctccaacagcacatctggaggatcttcaaatgacaacgcctacctcggctacagcaccccctgggggtattttgacttcaacagattccactgccacttctcaccacgtgactggcagcgactcatcaacaacaactggggattccggcctaagcgactcaacttcaagctcttcaacattcaggtcaaagaggttacggacaacaatggagtcaagaccatcgccaataaccttaccagcacggtccaggtcttcacggactcagactatcagctcccgtacgtgctcgggtcggctcacgagggctgcctcccgccgttcccagcggacgttttcacgattcctcagtacgggtatctgacgcttaatgatggaagccaggccgtgggtcgttcgtccttttactgcctggaatatttcccgtcgcaaatgctaagaacgggtaacaacttccagttcagctacgagtttgagaacgtacctttccatagcagctacgctcacagccaaagcctggaccgactaatgaatccactcatcgaccaatacttgtactatctctcaaagactattaacggttctggacagaatcaacaaacgctaaaattcagtgtggccggacccagcaacatggctgtccagggaagaaactacatacctggacccagctaccgacaacaacgtgtctcaaccactgtgactcaaaacaacaacagcgaatttgcttggcctggagcttcttcttgggctctcaatggacgtaatagcttgatgaatcctggacctgctatggccagccacaaagaaggagaggaccgtttctttcctttgtctggatctttaatttttggcaaacaaggaactggaagagacaacgtggatgcggacaaagtcatgataaccaacgaagaagaaattaaaactactaacccggtagcaacggagtcctatggacaagtggccacaaaccaccagagtgcccaagcacaggcgcagaccggctgggttcaaaaccaaggaatacttccgggtatggtttggcaggacagagatgtgtacctgcaaggacccatttgggccaaaattcctcacacggacggcaactttcacccttctccgctgatgggagggtttggaatgaagcacccgcctcctcagatcctcatcaaaaacacacctgtacctgcggatcctccaacggccttcaacaaggacaagctgaactctttcatcacccagtattctactggccaagtcagcgtggagatcgagtgggagctgcagaaggaaaacagcaagcgctggaacccggagatccagtacacttccaactattacaagtctaataatgttgaatttgctgttaatactgaaggtgtatatagtgaaccccgccccattgggccccgatacctgactcgtaatttt

SEQ ID NO: 3018 - DNA, 2208 bp, Artificial Sequence
  Synthetic polynucleotide
atggctgccgatggttatcttccagattggctcgaggacaaccttagtgaaggaattcgcgagtggtgggctttgaaacctggagcccctcaacccaaggcaaatcaacaacatcaagacaacgctcgaggtcttgtgcttccgggttacaaataccttggacccggcaacggactcgacaagggggagccggtcaacgcagcagacgcggcggccctcgagcacaacaaggcctacgaccagcagctcaaggccggagacaacccgtacctcaagtgcaaccacgccgacgccgagttccaggagcggctcaaagaagatacgtcttttgggggcaacctcgggcgagcagtcttccaggccaaaaagaggcttcttgaacctcttggtctggttgaggaagcggctaagacggctcctggaaagaagaggcctgtagagcagtctcctcaggaaccggactcctccgcgggtattggcaaatcgggtgcacagcccgctaaaaagagactcaatttcggtcagactggcgacacagagtcagtcccagaccctcaaccaatcggagaacctcccgcagccccctcaggtgtgagatctcttacaatggcttcaggtggtggcgcaccagtggcagacaataacgaaggtgccgatggagtgggtagttcctcgggaaattggcattgcgattcccaatggctgggggacagagtcatcaccaccagcacccgaacctgggccctgcccacctacaacaatcacctctacaagcaaatctccaacagcacatctggaggatcttcaaatgacaacgcctacctcggctacagcaccccctgggggtattttgacttcaacagattccactgccacttctcaccacgtgactggcagcgactcatcaacaacaactggggattccggcctaagcgactcaacttcaagctcttcaacattcaggtcaaagaggttacggacaacaatggagtcaagaccatcgccaataaccttaccagcacggtccaggtcttcacggactcagactatcagctcccgtacgtgctcgggtcggctcacgagggctgcctcccgccgttcccagcggacgttttcatgattcctcagtacgggtatctgacgcttaatgatggaagccaggccgtgggtcgttcgtccttttactgcctggaatatttcccgtcgcaaatgctaagaacgggtaacaacttccagttcagctacgagtttgagaacgtacctttccatagcagctacgctcacagccaaagcctggaccgactaatgaatccactcatcgaccaatacttgtactatctctcaaagactattaacggttctggacagaatcaacaaacgctaaaattcagtgtggccggacccagcaacatggctgtccagggaagaaactacatacctggacccagctaccgacaacaacgtgtctcaaccactgtgactcaaaacaacaacagcgaatttgcttggcctggagcttcttcttgggctctcaatggacgtaatagcttgatgaatcctggacctgctatggccagccacaaagaaggagaggaccgtttctttcctttgtctggatctttaatttttggcaaacaaggaactggaagagacaacgtggatgcggacaaagtcatgataaccaacgaagaagaaattaaaactactaacccggtagcaacggagtcctatggacaagtggccacaaaccaccagagtgcccaagcacaggcgcagaccggctgggttcaaaaccaaggaatacttccgggtatggtttggcaggacagagatgtgtacctgcaaggacccatttgggccaaaattcctcacacggacggcaactttcacccttctccgctgatgggagggtttggaatgaagcacccgcctcctcagatcctcatcaaaaacacacctgtacctgcggatcctccaacggccttcaacaaggacaagctgaactctttcatcacccagtattctactggccaagtcagcgtggagatcgagtgggagctgcagaaggaaaacagcaagcgctggaacccggagatccagtacacttccaactattacaagtctaataatgttgaatttgctgttaatactgaaggtgtatatagtgaaccccgccccattggcaccagatacctgactcgtaatctg

SEQ ID NO: 3019 - DNA, 2208 bp, Artificial Sequence
  Synthetic polynucleotide
atggctgccgatggttatcttccagattggctcgaggacaaccttagtgaaggaattcgcgagtggtgggctttgaaacctggagcccctcaacccaaggcaaatcaacaacatcaagacaacgctcgaggtcttgtgcttccgggttacaaataccttggacccggcaacggactcgacaagggggagccggtcaacgcagcagacgcggcggccctcgagcacgacaaggcctacgaccagcagctcaaggccggagacaacccgtacctcaagtgcaaccacgccgacgccgagttccaggagcggctcaaagaagatacgtcttttgggggcaacctcgggcgagcagtcttccaggccaaaaagaggcttcttgaacctcttggtctggttgaggaagcggctaagacggctcctggaaagaagaggcctgtagagcagtctcctcaggaaccggactcctccgcgggtattggcaaatcgggtgcacagcccgctaaaaagagactcaatttcggtcagactggcgacacagagtcagtcccagaccctcaaccaatcggagaacctcccgcagccccctcaggtgtgggatctcttacaatggcttcaggcggtggcgcaccagtggcagacaataacgaaggtgccgatggagtgggtagttcctcgggaaattggcattgcgattcccaatggctgggggacagagtcatcaccaccagcacccgaacctgggccctgcccacctacaacaatcacctctacaagcaaatctccaacagcacatctggaggatcttcaaatgacaacgcctacctcggctacagcaccccctgggggtattttgacttcaacagattccactgccacttctcaccacgtgactggcagcgactcatcaacaacaactggggattccggcctaagcgactcaacttcgagctcttcaacattcaggtcaaagaggttacggacaacaatggagtcaagaccatcgccaataaccttaccagcacggtccaggtcttcacggactcagactatcagctcccgtacgtgctcgggtcggctcacgagggctgcctcccgccgttcccagcggacgttttcatgattcctcagtacgggtatctgacgcttaatgatggaagccaggccgtgggtcgttcgtccttttactgcctggaatatttcccgtcgcaaatgctaagaacgggtaacaacttccagtccagctacgagtttgagaacgtacctttccatagcagctacgctcacagccaaagcctggaccgactaatgaatccactcatcgaccaatacttgtactatctctcaaagactattaacggttctggacagaatcaacaaacgctaaaattcagtgtggccggacccagcaacatggctgtccagggaagaaactacatacctggacccagctaccgacaacaacgtgcctcaaccactgtgactcaaaacaacaacagcgaatttgcttggcctggagcttcttcttgggctctcaatggacgtaatagcttgatgaatcctggacctgctatggccagccacaaagaaggggaggaccgtttctttcctttgtctggatctttaatttttggcaaacaaggaactggaagagacaacgtggatgcggacaaagtcatgataaccaacgaagaagaaattaaaactactaacccggtagcaacggagtcctatggacaagtggccacaaaccaccagagtgcccaagcacaggcgcagaccggctgggttcaaaaccaaggaatacttccgggtatggtttggcaggacagagatgtgtacctgcaaggacccatttgggccaaaattcctcacacggacggcaactttcacccttctccgctgatgggagggtttggaatgaagcacccgcctcctcagatcctcatcaaaaacacacctgtacctgcggatcctccaacggccttcaacaaggacaagctgaactctttcatcacccagtattctactggccaagtcagcgtggagatcgagtgggagctgcagaaggaaaacagcaagcgctggaacccggagatccagtacacttccaactattacaagtctaataatgttgaatttgctgttaatactgaaggtgtatatagtgaaccccgccccattggcaccagatacctgactcgtaatctg

SEQ ID NO: 3020 - DNA, 2208 bp, Artificial Sequence
  Synthetic polynucleotide
atggctgccgatggttatcttccagattggctcgaggacaaccttagtgaaggaattcgcgagtggtgggctttgaaacctggagcccctcaacccaaggcaaatcaacaacatcaagacaacgctcgaggtcttgtgcttccgggttacaaataccttggacccggcaacggactcgacaagggggagccggtcaacgcagcagacgcggcggccctcgagcacgacaaggcctacgaccagcagctcaaggccggagacaacccgtacctcaagtgcaaccacgccgacgccgagttccaggagcggctcaaagaagatacgtcttttgggggcaacctcgggcgagcagtcttccaggccaaaaagaggcttcttgaacctcttggtctggttgaggaagcggctaagacggctcctggaaagaagaggcctgtagagcagtctcctcaggaaccggactcctccgcgggtattggcaaatcgggtgcacagcccgctaaaaagagactcaatttcggtcagactggcgacacagagtcagtcccagaccctcaaccaatcggagaacctcccgcagcccccccaggtgtgggatctcttacaatggcttcaggtggtggcgcaccagtggcggacaataacgaaggtgccgatggagtgggtagttcctcgggaaattggcattgcgattcccaatggctgggggacagagtcatcaccaccagcacccgaacctgggccctgcccacctacaacaatcacctctacaagcaaatctccaacagcacatctggaggatcttcaaatgacaacgcctacctcggctacagcaccccctgggggtattttgacttcaacagattccactgccacttctcaccacgtgactggcagcgactcatcaacaacaactggggattccggcctaagcgactcaacttcaagctcttcaacattcaggtcaaagaggttacggacaacaatggagtcaagaccatcgccaataaccttaccagcacggtccaggtcttcacggactcagactatcagctcccgtacgtgctcgggtcggctcacgagggctgcctcccgccgttcccagcggacgttttcatgattcctcagtacgggtatctgacgcttaatgatggaagccaggccgtgggtcgttcgtccttttactgcctggaatatttcccgtcgcaaatgctaagaacgggtaacaacttccagttcagctacgagtttgagaacgtacctttccatagcagctacgctcacagccaaagcctggaccgactaatgaatccactcatcgaccaatacttgtactatctctcaaagactattagcggttctggacagaatcaacaaacgctaaaattcagtgtggccggacccagcaacatggctgtccagggaagaaactacatacctggacccagctaccgacaacaacgtgtctcaaccactgtgactcaaaacaacagcagcgaatttgcttggcctggagcttcttcttgggctctcaatggacgtaatagcttgatgaatcctggacctgctatggccagccacaaagaaggagaggaccgtttctttcctttgtctggatctttaatttttggcaaacaaggaactggaagagacaacgtggatgcggacaaagtcatgataaccaacgaagaagaaattaaaactactaacccggtagcaacggagtcctatggacaagtggccacaaaccaccagagtgcccaagcacaggcgcagaccggctgggttcaaaaccaaggaatactttcgggtatggtttggcaggacagagatgtgtacctgcaaggacccatttgggccaaaattcctcacacggacggcaactttcacccttctccgctgatgggagggtttggaatgaagcacccgcctcctcagatcctcatcaaaaacacacctgtacctgcggatcctccaacggccttcaacaaggacaagctgaactctttcatcacccagtattctactggccaagtcagcgtggagatcgagtgggagctgcagaaggaaaacagcaagcgctggaacccggagatccagtacacttccaactattacaagtctaataatgttgaatttgctgttaatactgaaggtgtatatagtgaaccccgccccattggcaccagatacctgactcgtaatctg

SEQ ID NO: 3021 - DNA, 2208 bp, Artificial Sequence
  Synthetic polynucleotide
atggctgccgatggttatcttccagattggctcgaggacaaccttagtgaaggaattcgcgagtggtgggctttgaaacctggagcccctcaacccaaggcaaatcaacaacatcaagacaacgctcgaggtcttgtgcttccgggttacaaataccttggacccggcaacggactcgacaagggggagccggtcaacgcagcagacgcggcggccctcgagcacgacaaggcctacgaccagcagctcaaggccggagacaacccgtacctcaagtgcaaccacgccgacgccgagttccaggagcggctcaaagaagatacgtcttttgggggcaacctcgggcgagcagtcttccaggccaaaaagaggcttcttgaacctcttggtctggttgaggaagcggctaagacggctcctggaaagaagaggcctgtagagcagtctcctcaggaaccggactcctccgcgggtattggcaaatcgggtgcacagcccgctaaaaagagactcaatttcggtcagactggcgacacagagtcagtcccagaccctcaaccaatcggagaacctcccgcagccccctcaggtgtgggatctcttacaatggcttcaggtggtggcgcaccagtggcagacaataacgaaggtgccgatggagtgggtagttcctcgggaaattggcattgcgattcccaatggctgggggacagagtcatcaccaccagcacccgaacctgggccctgcccacctacaacaatcacctctacaagcaaatctccaacagcacatctggaggatcttcaaatgacaacgcctacctcggctacagcaccccctgggggtattttgacttcaacagattccactgccacttctcaccacgtgactggcagcgactcatcaacaacaactggggattccggcctaagcgactcaacttcaagctcttcaacattcaggtcaaagaggttacggacaacaatggagtcaagaccatcgccaataaccttaccagcacggtccaggtcttcacggactcagactatcagctcccgtacgtgctcgggtcggctcacgagggctgcctcccgccgttcccagcggacgttttcatgattcctcagtacgggtatctgacgcttaatgatggaagccaggccgtgggtcgttcgtccttttactgcctggaatatttcccgtcgcaaatgctaagaacgggtaacaacttccagttcagctacgagtttgagaacgtacctttccatagcagctacgctcacagccaaagcctggaccgactaatgaatccactcatcgaccaatacttgtactatctctcaaagactattaacggttctggacagaatcaacaaacgctaaaattcagtgtggccggacccagcaacatggctgtccagggaagaaactacatacctggacccagctaccgacaacaacgtgtctcaaccactgtgactcaaaacaacaacagcgaatttgcttggcctggagcttcttcttgggctctcaatggacgtaatagcttgatgaatcctggacctgctatggccagccacaaagaaggagaggaccgtttctttcctttgtctggatctttaatttttggcaaacaaggaactggaagagacaacgtggatgcggacaaagtcatgataaccaacgaagaagaaattaaaactactaacccggtagcaacggagtcctatggacaagtggccacaaaccaccagagtgcccaagcacaggcgcagaccggctgggttcaaaaccaaggaatacttccgggtatggtttggcaggacagagatgtgtacctgcaaggacccatttgggccaaaattcctcacacggacggcaactttcacccttctccgctgatgggagggtttggaatgaagcacccgcctcctcagatcctcatcaaaaacacacctgtacctgcggatcctccaacggccttcaacaaggacaagctgaactctttcatcacccagtattctactggccaagtcagcgtggagatcgagtgggagctgcagaaggaaaacagcaagcgctggaacccggagatccagtacacttccaactattacaagtctaataatgttgaatttgctgttaatactgaaggtgtatatagtgaaccccgccccattggcaccagatacctgactcgtaatctg

SEQ ID NO: 3022 - DNA, 2208 bp, Artificial Sequence; identical to SEQ ID NO: 3021
  Synthetic polynucleotide

SEQ ID NO: 3023 - DNA, 2208 bp, Artificial Sequence
  Synthetic polynucleotide
atggctgccgatggttatcttccagattggctcgaggacaaccttagtgaaggaattcgcgagtggtgggctttgaaacctggagcccctcaacccaaggcaaatcaacaacatcaagacaacgctcgaggtcttgtgcttccgggttacaaataccttggacccggcaacggactcgacaagggggagccggtcaacgcagcagacgcggcggccctcgagcacgacaaggcctacgaccagcagctcaaggccggagacaacccgtacctcaagtgcaaccacgccgacgccgagttccaggagcggctcaaagaagatacgtcttttgggggcaacctcgggcgagcagtcttccaggccaaaaagaggcttcttgaacctcttggtctggttgaggaagcggctaagacggctcctggaaagaagaggcctgtagagcagtctcctcaggaaccggactcctccgcgggtattggcaaatcgggtgcacagcccgctaaaaagagactcaatttcggtcagactggcgacacagagtcagtcccagaccctcaaccaatcggagaacctcccgcagccccctcaggtgtgggatctcttacaatggcttcaggtggtggcgcaccagtggcagacaataacgaaggtgccgatggagtgggtagttcctcgggaaattggcattgcgattcccaatggctgggggacagagtcatcaccaccagcacccgaacctgggccctgcccacctacaacaatcacctctacaagcaaatctccaacagcacatctggaggatcttcaaatgacaacgcctacctcgactacagcaccccctgggggtattttgacttcaacagattccactgccacttctcaccacgtgactggcagcggctcatcaacaacaactggggattccggcctaagcgactcaacttcaagctcttcaacattcaggtcaaagaggttacggacaacaatggagtcaagaccatcgccaataaccttaccagcacggtccaggtcttcacggactcagactatcagctcccgtacgtgctcgggtcggctcacgagggctgcctcccgccgttcccagcggacgttttcatgattcctcagtacgggtatctgacgcttaatgatggaagccaggccgtgggtcgttcgtccttttactgcctggaatatttcccgtcgcaaatgctaagaacgggtaacaacttccagttcagctacgagtttgagaacgtacctttccatagcagctacgctcacagccaaagcctggaccgactaatgaatccactcatcgaccaatacttgtactatctctcaaagactattaacggttctggacagaatcaacaaacgctaaaattcagtgtggccggacccagcaacatggctgtccagggaagaaactacatacctggacccagctaccgacaacaacgtgtctcaaccactgtgactcaaaacaacaacagcgaatttgcttggcctggagcttcttcttgggctctcaatggacgtaatagcttgatgaatcctggacctgctatggccagccacaaagaaggagaggaccgtttctttcctttgtctggatctttaatttttggcaaacaaggaactggaagagacaacgtggatgcggacaaagtcatgataaccaacgaagaagaaattaaaactactaacccggtagcaacggagtcctatggacaagtggccacaaaccaccagagtgcccaagcacaggcgcagaccggctgggttcaaaaccaaggaatacttccgggtatggtttggcagggcagagatgtgtacctgcaaggacccatttgggccaaaattcctcacacggacggcaactttcacccttctccgctgatgggagggtttggaatgaagcacccgcctcctcagatcctcatcaaaaacacacctgtacctgcggatcctccaacggccttcaacaaggacaagctgaactctttcatcacccagtattctactggccaagtcagcgtggagatcgagtgggagctgcagaaggaaaacagcaagcgctggaacccggagatccagtacacttccaactattacaagtctaataatgttgaatttgctgttaatactgaaggtgtatatagtgaaccccgccccattggcaccagatacctgactcgtaatctg

SEQ ID NO: 3024 - DNA, 2208 bp, Artificial Sequence; identical to SEQ ID NO: 3021
  Synthetic polynucleotide

SEQ ID NO: 3025 - DNA, 2208 bp, Artificial Sequence
  Synthetic polynucleotide
atggctgccgatggttatcctccagattggctcgaggacaaccttagtgaaggaattcgcgagtggtgggctttgaaacctggagcccctcaacccaaggcaaatcaacaacatcaagacaacgctcgaggtcttgtgcttccgggttacaaataccttggacccggcaacggactcgacaagggggagccggtcaacgcagcagacgcggcggccctcgagcacgacaaggcctacgaccagcagctcaaggccggggacaacccgcacctcaagtacaaccacgccgacgccgagttccaggagcggctcaaagaagatacgtcttttgggggcaacctcgggcgagcagtcttccaggccaaaaagaggcttcttgaacctcttggtctggttgaggaagcggctaagacggctcctggaaagaagaggcccgtagagcagtctcctcaggaaccggactcctccgcgggtattggcaaatcgggtgcacagcccgctaagaagagactcaatttcggtcagactggcgacactgagtcagtcccagaccctcaaccaatcggagaacctcccgcagccccctcaggtgtgggatctcttacaatggcttcaggtggtggcgcaccagtggcagacaataacgaaggtgccgatggagtgggtagttcctcgggaaattggcattgcgattcccaatggctgggggacagagtcatcaccaccagcacccgaacctgggccctgcccacctacaacaatcacctctacaagcaaatctccaacagcacatctggaggatcttcaaatgacaacgcctacttcggctacagcaccccctgggggtattttgacttcaacagattccactgccacttctcaccacgtgactggcagcgactcatcaacaacaactggggattccggcctaagcgactcaacttcaagctcttcaacattcaggtcaaagaggttacggacaacaatggagtcaagaccatcgccaataaccttaccagcacggtccaggtcttcacggactcagactatcagctcccgtacgtgctcgggtcggctcacgagggctgcctcccgccgttcccagcggacgttttcatgattcctcagtacgggtatctgacgcttaatgatggaagccaggccgtgggtcgttcgtccttttactgcctggaatatttcccgtcgcaaatgctaagaacgggtaacaacttccagttcagctacgagtttgagaacgtacctttccatagcagctacgctcacagccaaagcctggaccgactaatgaatccactcatcgaccaatacttgtactatctctcaaagactattaacggttctggacagaatcaacaaacgctaaaattcagtgtggccggacccagcaacatggctgtccagggaagaaactacatacctggacccagctaccgacaacaacgtgtctcaaccactgtgactcaaaacaacaacagcgaatttgcttggcctggagcttcttcttgggctctcaatggacgtaatagcttgatgaatcctggacctgctatggccagccacaaagaaggagaggaccgtttctttcctttgtctggatctttaatttttggcaaacaaggaactggaagagacaacgtggatgcggacaaagtcatgataaccaacgaagaagaaattaaaactactaacccggtagcaacggagtcctatggacaagtggccacaaaccaccagagtgcccaagcacaggcgcagaccggctgggttcaaaaccaaggaatacttccgggtatggtttggcaggacagagatgtgtacctgcaaggacccatttgggccaaaattcctcacacggacggcaactttcacccttctccgctgatgggagggtttggagtgaagcacccgcctcctcagatcctcatcaaaaacacacctgtacctgcggatcctccaacggccttcaacaaggacaggctgaactctttcatcacccagtattctactggccaagtcagcgtggagatcgagtgggagctgcagaaggaaaacagcaagcgctggaacccggagatccagtacacttccaactattacaagtctaataatgttgaatttgctgttaatactgaaggtgtatatagtgaaccccgccccattggcaccagatacctgactcgtaatctg

SEQ ID NO: 3026 - DNA, 2208 bp, Artificial Sequence
  Synthetic polynucleotide
atggctgccgatggttatcttccagattggctcgaggacaaccttagtgaaggaattcgcgagtggtgggctttgaaacctggagcccctcaacccaaggcaaatcaacaacatcaagacaacgctcgaggtcttgtgcttccgggttacaaataccttggacccggcaacggactcgacaagggggagccggtcaacgcagcagacgcggcggccctcgagcacgacaaggcctacgaccagcagctcaaggccggagacaacccgtacctcaagtacaaccacgccgacgccgagttccaggagcggctcaaagaagatacgtcttttgggggcaacctcgggcgagcagtcttccaggccaaaaagaggcttcttgaacctcttggtctggttgaggaagcggctaagacggctcctggaaagaagaggcctgtagagcagtctcctcaggaaccggactcctccgcgggtattggcaaatcgggtgcacagcccgctaaaaagagactcaatttcggtcagactggcgacacagagtcagtcccagaccctcaaccaatcggagaacctcccgcagccccctcaggtgtgggatctcttacaatggcttcaggtggtggcgcaccagtggcggacaataacgaaggtgccgatggagtgggtagttcctcgggaaattggcattgcgattcccaatggctgggggacagagtcatcaccaccagcacccgaacctgggccctgcccacctacaacaatcacctctacaagcaaatctccaacagcacatctggaggatcttcaaatgacaacgcctacttcggctacagcaccccctgggggtattttgacttcaacagattccactgccacttctcaccacgtgactggcagcgactcatcaacaacaactggggattccggcctaagcgactcaacttcaagctcttcaacattcaggtcaaagaggttacggacaacaatggagtcaagaccatcgccaataaccttaccagcacggtccaggtcttcacggactcagactatcagctcccgtacgtgctcgggtcggctcacgagggctgcctcccgccgttcccagcggacgttttcatgattcctcagtacgggtatctgacgcttaatgatggaagccaggccgtgggtcgttcgtccttttactgcctggaatatttcccgtcgcaaatgctaagaacgggtaacaacttccagttcagctacgagtttgagaacgtacctttccatagcagctacgctcacagccaaagcctggaccgactaatgaatccactcatcgaccaatacttgtactatctctcaaagactattaacggttctggacagaatcaacaaacgctaaaattcagtgtggccggacccagcaacatggctgtccagggaagaaactacatacctggacccagctaccgacaacaacgtgtctcaaccactgtgactcaaaacaacaacagcgaatttgcttggcctggagcttcttcttgggctctcaatggacgtaatagtttgatgaatcctggacctgctatggccagccacaaagaaggagaggaccgtttctttcctttgtctggatctttaatttttggcaaacaaggaactggaagagacaacgtggatgcggacaaagtcatgataaccaacgaagaagaaattaaaactactaacccggtagcaacggagtcctatggacaagtggccacaaaccaccagagtgcccaagcacaggcgcagaccggctgggttcaaaaccaaggaatacttccgggtatggtttggcaggacagagatgtgtacctgcaaggacccatttgggccaaaattcctcacacggacggcaactttcacccttctccgctgatgggagggtttggagtgaagcacccgcctcctcagatcctcatcaaaaacacacctgtacctgcggatcctccaacggccttcaacaaggacaagctgaactctttcatcacccagtattctactggccaagtcagcgtggagatcgagtgggagctgcagaaggaaaacagcaagcgctggaacccggagatccagtacacttccaactattacaagtctaataatgttgaatttgctgttaatactgaaggtgtatatagtgaaccccgccccattggcaccagatacctgactcgtaatctg

SEQ ID NO: 3027 - DNA, 2208 bp, Artificial Sequence
  Synthetic polynucleotide
atggctgccgatggttatcttccagattggctcgaggacaaccttagtgaaggaattcgcgagtggtgggctttgaaacctggagcccctcaacccaaggcaaatcaacaacatcaagacaacgctcgaggtcttgtgcttccgggttacaaataccttggacccggcaacggactcgacaagggggagccggtcaacgcagcagacgcggcggccctcgagcacgacaaggcctacgaccagcagctcaaggccggagacaacccgtacctcaagtacaaccacgccgacgccgagttccaggagcggctcaaagaagatacgtcttttgggggcaacctcgggcgagcagtcttccaggccaaaaagaggcttcttgaacctcttggtctggttgaggaagcggctaagacggctcctggaaagaagaggcctgtagagcagtctcctcaggaaccggactcctccgcgggtattggcaaatcgggtgcacagcccgctaaaaagagactcaatttcggtcagactggcgacacagagtcagtcccagaccctcaaccaatcggagaacctcccgcagccccctcaggtgtgggatctcttacaatggcttcaggtggtggcgcaccagtggcagacaataacgaaggtgccgatggagtgggtagttcctcgggaaattggcattgcgattcccaatggctgggggacagagtcatcaccaccagcacccgaacctgggccctgcccacttacaacaatcacctctacaagcaaatctccaacagcacatctggaggatcttcaaatgacaacgcctacttcggctacagcaccccctgggggtattttgacttcaacagattccactgccacttctcaccacgtgactggcagcgactcaccaacaacaactggggattccggcctaagcgactcaacttcaagctcttcaacattcaggtcaaagaggttacggacaacaatggagtcaagaccatcgccaataaccttaccagcacggtccaggtcttcacggactcagactatcagctcccgtacgtgctcgggtcggctcacgagggctgcctcccgccgttcccagcggacgttttcatgattcctcagtacgggtatctgacgcttaatgatggaagccaggccgtgggtcgttcgtccttttactgcctggaatatatcccgtcgcaaatgctaagaacgggtaacaacttccagttcagctacgagtttgagaacgtacctttccatagcagctacgctcacagccaaagcctggaccgactaatgaatccactcatcgaccaatacttgtactatctctcaaagactattaacggttctggacagaatcaacaaacgctaaaattcagtgtggccggacccagcaacatggctgtccagggaagaaactacatacctggacccagctaccgacaacaacgtgtctcaaccactgtgactcaaaacaacaacagcgaatttgcttggcctggagcttcttcttgggctctcaatggacgtaatagcttgatgaatcctggacctgctatggccagccacaaagaaggagaggaccgtttctttcctttgtctggatctttaatttttggcaaacaaggaactggaagagacaacgtggatgcggacaaagtcatgataaccaacgaagaagaaattaaaactactaacccggtagcaacggagtcctatggacaagtggccacaaaccaccagagtgcccaagcacaggcgcagaccggctgggttcaaaaccaaggaatacttccgggtatggtttggcaggacagagatgtgtacctgcaaggacccatttgggccaaaattcctcacacggacggcaactttcacccttctccgctgatgggagggtttggagtgaagcacccgcctcctcagatcctcatcaaaaacacacctgtacctgcggatcctccaacggccttcaacaaggacaagctgaactctttcatcacccagtattctactggccaagtcagcgtggagatcgagtgggagctgcagaaggaaaacagcaagcgctggaacccggagatccagtacacttccaactattacaagtctaataatgttgaatttgctgttaatactgaaggtgtatatagtgaaccccgccccattggcaccagatacctgactcgtaatctg

SEQ ID NO: 3028 - DNA, 2208 bp, Artificial Sequence
  Synthetic polynucleotide
atggctgccgatggttatcttccagattggctcgaggacaaccttagtgaaggaattcgcgagtggtgggctttgaaacctggagcccctcaacccaaggcaaatcaacaacatcaagacaacgctcgaggtcttgtgcttccgggttacaaataccttggacccggcaacggactcgacaagggggagccggtcaacgcagcagacgcggcggccctcgagcacgacaaggcctacgaccagcagctcaaggccggagacaacccgtacctcaagtacaaccacgccgacgccgagttccaggagcggctcaaagaagatacgtcttttgggggcaacctcgggcgagcagtcttccaggccaaaaagaggcttcttgaacctcttggtctggttgaggaagcggctaagacggctcctggaaagaagaggcctgtagagcagtctcctcaggaaccggactcctccgcgggtattggcaaatcgggtgcacagcccgctaaaaagagactcaatttcggtcagactggcgacacagagtcagtcccagaccctcaaccaatcggagaacctcccgcagccccctcaggtgtgggatctcttacaatggcttcaggtggtggcgcaccagtggcagacaataacgaaggtgccgatggagtgggtagttcctcgggaaattggcattgcgattcccaatggctgggggacagagtcatcaccaccagcacccgaacctgggccctgcccacctacaacaatcacctctacaagcaaatctccaacagcacatctggaggatcttcaaatgacaacgcctacttcggctacagcaccccctgggggtattttgacttcaacagattccactgccacttctcaccacgtgactggcagcgactcatcaacaacaactggggattccggcctaagcgactcaacttcaagctcttcaacattcaggtcaaagaggttacggacaacaatggagtcaagaccatcgccaataaccttaccagcacggtccaggtcttcacggactcagactatcagctcccgtacgtgctcgggtcggctcacgagggctgcctcccgccgttcccagcggacgttttcatgattcctcagtacgggtatctgacgcttaatgatggaagccaggccgtgggtcgttcgtccttttactgcctggaatatttcccgtcgcaaatgctaagaacgggtaacaacttccagtttagctacgagtttgagaacgtacctttccatagcagctacgctcacagccaaagcctggaccgactaatgaatccactcatcgaccaatacttgtactatctctcaaagactattaacggttctggacagaatcaacaaacgctaaaattcagtgtggccggacccagcaacatggctgtccagggaagaaactacatacctggacccagctaccgacaacaacgtgtctcaaccactgtgactcaaaacaacaacagcgaatttgcttggcctggagcttcttcttgggctctcaatggacgtaatagcttgatgaatcctggacctgctatggccagccacaaagaaggagaggaccgtttctttcctttgtctggatctttaatttctggcaaacaaggaactggaagagacaacgtggatgcgaacaaagtcatgataaccaacgaagaagaaattaaaactactaacccggtagcaacggagtcctatggacaagtggccacaaaccaccagagtgcccaagcacaggcgcagaccggctgggttcaaaaccaaggaatacttccgggtatggtttggcaggacagagatgtgtacctgcaaggacccatttgggccaaaattcctcacacggacggcaactttcacccttctccgctgatgggagggtttgaaatgaagcacccgcctcctcagatcctcatcaaaaacacacctgtacctgcggatcctccaacggccttcaacaaggacaagctgaactctttcatcacccagtattctactggccaagtcagcgtggagatcgagtgggagctgcagaaggaaaacagcaagcgctggaacccggagatccagtacacttccaactattacaagtctaataatgttgaatttgctgttaatactgaaggtgtatatagtgaaccccgccccattggcaccagatacctgactcgtaatctg

SEQ ID NO: 3029 - DNA, 2208 bp, Artificial Sequence
  Synthetic polynucleotide
atggctgccgatggttatcttccagattggctcgaggacaaccttagtgaaggaattcgcgagtggtgggctttgaaacctggagcccctcaacccaaggcaaatcaacaacatcaagacaacgctcgaggtcttgtgcttccgggttacaaataccttggacccggcaacggactcgacaagggggagccggtcaacgcagcagacgcggcggccctcgagcacgacaaggcctacgaccagcagctcaaggccggagacaacccgtacctcaagtacaaccacgccgacgccgagttccaggagcggctcaaagaagatacgtcttttgggggcaacctcgggcgagcagtcttccaggccaaaaagaggcttcttgaacctcttggtctggttgaggaagcggctaagacggctcctggaaagaagaggcctgtagagcagtctcctcaggaaccggactcctccgcgggtattggcaaatcgggtgcacagcccgctaaaaagagactcaatttcggtcagactggcgacacagagtcagtcccagaccctcaaccaatcggagaacctcccgcagccccctcaggtgtgggatctcttacaatagcttcaggtggtggcgcaccagtggcagacaataacgaaggtgccgatggagtgggtagttcctcgggaaattggcattgcgattcccaatggctgggggacagagtcatcaccaccagcacccgaacctgggccctgcccacctacaacaatcacctctacaagcgaatctccaacagcacatctggaggatcttcaaatgacaacgcctacttcggctacagcaccccctgggggtattttgacttcaacagattccactgccacttctcaccacgtgactggcagcgactcatcaacaacaactggggattccggcctaagcgactcaacttcaagcttttcaacattcgggtcaaagaggttacggacaacaatggagtcaagaccatcaccaataaccttaccagcacggtccaggtcttcacggactcagactatcagctcccgtacgtgcttgggtcggctcacgagggctgcctcccgccgttcccagcggacgttttcatgattcctcagtacgggtatctgacgcttaatgatggaagccaggccgtgggtcgttcgtccttttactgcctggaatatttcccgtcgcaaatgctaagaacgggtaacaacttccagttcagctacgagtttgagaacgtacctttccatagcagctacgctcacagccaaagcctggaccgactaatgaatccactcatcgaccaatacttgtactatctctcaaagactattaacggttctggacagaatcaacaaacgctaaaattcagtgtggccggacccagcaacatggctgtccagggaagaaactacatacctggacccagctaccgacaacaacgtgtctcaaccactgtgactcgaaacaacaacagcgaatttgcttggcctggagcttcttcttgggctctcaatggacgtaatagcttgatgaatcctggacctgctatggccagccacaaagaaggagaggaccgtttctttcctttgtctggatctttaatttttggcaaacaaggaactggaagagacaacgtggatgcggacaaagtcatgataaccaacgaagaagaaattaaaactactaacccggtagcaacggagtcctatggacaagtggccacaaaccaccagagtgcccaagcacaggcgcagaccggctgggttcaaaaccaaggaatacttccgggtatggtttggcaggacagagatgtgtacctgcaaggacccatttgggccaaaattcctcacacggacggcaactttcacccttctccgctgatgggagggtttggagtgaagcacccgcctcctcagatcctcatcaaaaacacacctgtacctgcggatcctccaacggccttcaacaaggacaagctgaactctttcatcacccagtattctactggccaagtcagcgtggagatcgagtgggagctgcagaaggaaaacagcaagcgctggaacccggagatccagtacacttccaactattacaagtctaataatgttgaatttgctgttaatactgaaggtgtatatagtgaaccccgccccattggcaccagatacctgactcgtaatctg

SEQ ID NO: 3030 - DNA, 2208 bp, Artificial Sequence
  Synthetic polynucleotide
atggctgccgatggttatcttccagattggctcgaggacaaccttagtgaaggaattcgcgagtggtgggctttgaaacctggagcccctcaacccaaggcaaatcaacaacatcaagacaacgctcgaggtcttgtgcttccgggttacaaataccttggacccggcaacggactcgacaagggggagccggtcaacgcagcagacgcggcggccctcgagcacgacaaggcctacgaccagcagctcaaggccggagacaacccgtacctcaagtacaaccacgccgacgccgagttccaggagcggctcaaagaagatacgtcttttgggggcaacctcgggcgagcagtcttccaggccaaaaagaggcttcttgaacctcttggtctggttgaggaagcggctaagacggctcctggaaagaagaggcctgtagagcagtctcctcaggaaccggactcctccgcgggtattggcaaatcgggcgcacagcccgctaaaaagagactcaatttcggtcagactggcgacacagagccagtcccagaccctcaaccaatcggagaacctcccgcagccccctcaggtgtgggatctcttacaatggcttcaggtggtggcgcaccagtggcagacaataacgaaggtgccgatggagtgggtagttcctcgggaaattggcattgcgattcccaatggctgggggacagagtcatcaccaccagcacccgaacctgggccctgcccacctacaacaatcacctctacaagcaaatctccaacagcacatctggaggatcttcaaatgacaacgcctacttcggctacagcaccccctgggggtattttgacttcaacagattccactgccacttctcaccacgtgactggcagcgactcatcaacaacaactggggattccggcctaagcgactcaacttcaagctcttcaacattcaggtcaaagaggttacggacaacaatggagtcaagaccatcgccaataaccttaccagcacggtccaggtcttcacggactcagactatcagctcccgtacgtgctcgggtcggctcacgagggctgcctcccgccgttcccagcgggcgttttcatgattcctcagtacgggtatctgacgcttaatgatggaagccaggccgtgggtcgttcgtccttttactgcctggaatatttcccgtcgcaaatgctaagaacgggtaacaacttccagttcagctacgagtttgagaacgtacctttccatagcagctacgctcacagccaaagcctggaccgactaatgaatccactcatcgaccaatacttgtactatctctcaaagactattaacggttctggacagaatcaacaaacgctaaaattcagtgtggccggacccagcaacatggctgtccagggaagaaactacatacctggacccagctaccgacaacaacgtgtctcaaccactgcgactcaaaacaacaacagcgaatttgcttggcctggagcttcttcttgggctctcaatggacgtaatagcttgatgaatcctggacctgctatggccagccacaaagaaggagaggaccgtttctttcctttgtctggatctttaatttttggcaaacaaggaactggaagagacaacgtggatgcggacaaagtcatgataaccaacgaagaagaaattaaaactactaacccggtagcaacggagtcctatggacaagtggccacaaaccaccagagtgcccaagcacaggcgcagaccggctgggttcaaaaccaaggaatacttccgggtatggtttggcaggacagagatgtgtacctgcaaggacccatttgggccaaaattcctcacacggacggcaactttcacccttctccgctgatgggagggtttggaatgaagcacccgcctcctcagatcctcatcaaaaacacacctgtacctgcggatcctccaacggccttcaacaaggacaagctgaactctttcatcacccagtattctactggccaagtcagcgtggagatcgagtgggagctgcagaaggaaaacagcaagcgctggaacccggagatccagtacacttccaactattacaagtctaataatgttgaatttgctgttaatactgaaggtgtatatagtgaaccccgccccattggcaccagatacctgactcgtaatctg

SEQ ID NO: 3031 - DNA, 2208 bp, Artificial Sequence
  Synthetic polynucleotide
atggctgccgatggttatcttccagattggctcgaggacaaccttagtgaaggaattcgcgagtggtgggctttgaaacctggagcccctcaacccaaggcaaatcaacaacatcaagacaacgctcgaggtcttgtgcttccgggttacaaataccttggacccggcaacggactcgacaagggggagccggtcaacgcagcagacgcggcggccctcgagcacgacaaggcctacgaccagcagctcaaggccggagacaacccgtacctcaagtacaaccacgccgacgccgggttccaggagcggctcaaagaagatacgtcttttgggggcaacctcgggcgagcagtcttccaggccaaaaagaggcttcttgaacctcttggtctggttgaggaagcggctaagacggctcctggaaagaagaggcctgtagagcagtctcctcaggaaccggactcctccgcgggtattggcaaatcgggtgcacagcccgctaaaaagagactcaatttcggtcagactggcgacacagagtcagtcccagtccctcaaccaatcggagaacctcccgcagccccctcaggtgtgggatctcttacaatggcttcaggtggtggcgcaccagtggcagacaataacgaaggtgccgatggagtgggtagttcctcgggaaattggcattgcgattcccaatggctgggggacagagtcatcaccaccagcacccgaacctgggccctgcccacctacaacaatcacctctacaagcaaatctccaacagcacatctggaggatcttcaaatgacaacgcctacttcggctacagcaccccctgggggtattttgacttcaacagattccactgccacttctcaccacgtgactggcagcgactcatcaacaacaactggggattccggcctaagcgactcaacttcaagctcttcaacattcaggtcaaagaggttacggacaacaatggagtcaagaccatcgccaataaccttaccagcacggtccaggtcttcacggactcagactatcagctcccgtacgtgctcgggtcggctcacgagggctgcctcccgccgttcccagcggacgttttcatgattcctcagtacgggtatctgacgcttaatgatggaagccaggccgtgggtcgttcgtccttttactgcctggaatatttcccgtcgcaaatgctaagaacgggtaacaacttccagttcagctacgagtttgagaacgtacctttccatagcagctacgctcacagccaaagcctggaccgactaatgaatccactcatcgaccaatacttgtactatctctcaaagactattaacggttctggacagaatcaacaaacgctaaaattcagtgtggccggacccagcaacatggctgtccagggaagaaactacatacctggacccagctaccgacaacaacgtgtctcaaccactgtgactcaaaacaacaacagcgaatttgcttggcctggagcttcttcttgggctctcaatggacgtaatagcttgatgaatcctggacctgctatggccagccacaaagaaggagaggaccgtttctttcctttgtctggatctttaatttttggcaaacaaggagctggaagagacaacgtggatgcggacaaagtcatgataaccaacgaagaagaaattaaaactactaacccggtagcaacggagtcctatggacaagtggccacaaaccaccagagtgcccaagcacaggcgcagaccggctgggttcaaaaccaaggaatacttccgggtatggtttggcaggacagagatgtgtacctgcaaggacccatttgggccaaaattcctcacacggacggcaactttcacccttctccgctgatgggagggtttggaatgaagcacccgcctcctcagatcctcatcaaaaacacacctgtacctgcggatcctccaacggccttcaacaaggacaagctgaactctttcatcacccagtattctactggccaagtcagcgtggagatcgagtgggagctgcagaaggaaaacagcaagcgctggaacccggagatccagtacacttccaactattacaagtctaataatgttgaatttgctgttaatactgaaggtgtatatagtgaaccccgccccattggcaccagatacctgactcgtaatctg

SEQ ID NO: 3032 - DNA, 2208 bp, Artificial Sequence
  Synthetic polynucleotide
  modified_base (377)..(377): a, c, g, or t
  misc_feature (377)..(377): n is a, c, g, or t
atggctgccgatggttatcttccagattggctcgaggacaaccttagtgaaggaattcgcgagaggtgggctttgaaacctggagcccctcaacccaaggcaaatcaacaacatcaagacaacgctcgaggtcttgtgcttccgggttacaaataccttggacccggcaacggactcgacaagggggagccggtcaacgcagcagacgcggcggccctcgagcacgacaaggcctacgaccagcagctcaaggccggagacaacccgtacctcaagtacaaccacgccgacgccgagttccaggagcggctcaaagaagatacgtcttttgggggcaacctcgggcgagcagtcttccaggccaaaaagaggcttcntgaacctcttggtctggttgaggaagcggctaagacggctcctggaaagaagaggcctgtagagcagtctcctcaggaaccggactcctccgcgggtattggcaaatcgggtgcacagcccgctaaaaagagactcaatttcggtcagactggcgacacagagtcagtcccagaccctcaaccaatcggagaacctcccgcagccccctcaggtgtgggatctcttacaatggcttcaggtggtggcgcaccagtggcagacaataacgaaggtgccgatggagtgggtagttcctcggggaattggcattgcgattcccaatggctgggggacagagtcatcaccaccagcacccgaacctgggccctgcccacctacaacaatcacctctacaagcaaatctccaacagcacatctggaggatcttcaaatgacaacgcctacttcggctacagcaccccctgggggtattttgacttcaacagattccactgccacttctcaccacgtgactggcagcgactcatcaacaacaactggggattccggcctaagcgactcaacttcaagctcttcaacattcaggtcaaagaggttacggacaacaatggagtcaagaccatcgccaataaccttaccagcacggtccaggtcttcacggactcagactatcagctcccgtacgtgctcgggtcggctcacgagggctgcctcccgccgttcccagcggacgttttcatgattcctcagtacgggtatctgacgcttaatgatggaagccaggccgtgggtcgttcgtccttttactgcctggaatatttcccgtcgcaaatgctaagaacgggtaacaacttccagttcagctacgagtttgagaacgtacctttccatagcagctacgctcacagccaaagcccggaccgactaatgaatccactcatcgaccaatacttgtactatctctcaaagactattaacggttctggacagaatcaacaaacgctaaaattcagtgtggccggacccagcaacatggctgtccagggaagaaactacatacctggacccagctaccgacaacaacgtgtctcaaccactgtgactcaaaacaacaacagcgaatttgcttggcctggagcttcttcttgggctctcaatggacgtaatagcttgatgaatcctggacctgctatggccagccacaaagaaggagaggaccgtttctttcctttgtctggatctttaatttttggcaaacaaggaactggaagagacaacgtggatgcggacaaagtcatgataaccaacgaagaagaaattaaaactactaacccggtagcaacggagtcctatggacaagtggccacaaaccaccagagtgcccaagcacaggcgcagaccggctgggttcaaaaccaaggaatacttccgggtatggtttggcaggacagagatgtgtacctgcaaggacccatttgggccaaaattcctcacacggacggcaactttcacccttctccgctgatgggagggtttggagtgaagcacccgcctcctcagatcctcatcaaaaacacacctgtacctgcggatcctccaacggccttcaacaaggacaagctgaactctttcatcacccagtattctactggccaagtcagcgtggagatcgagtgggagctgcagaaggaaaacagcaagcgctggaacccggagatccagtacacttccaactattacaagtctaataatgttgaatttgctgttaatactgaaggtgtatatagtgaaccccgccccattggcaccagatacctgactcgtaatctg

SEQ ID NO: 3033 - DNA, 2208 bp, Artificial Sequence
  Synthetic polynucleotide
atggctgccgatggttatcttccagattggctcgaggacaaccttagtgaaggaattcgcgagtggtgggctttgaaacctggagcccctcaacccaaggcaaatcaacaacatcaagacaacgctcgaggtcttgtgcttccgggttacaaataccttggacccggcaacggactcgacaagggggagccggtcaacgcagcagacgcggcggccctcgagcacgacaaggcctacgaccagcagctcaaggccggagacaacccgtacctcaagtacaaccacgccgacgccgagttccaggagcggctcaaagaagatacgtcttttgggggcaacctcgggcgagcagtcttccaggccaaaaagaggcttcttgaacctcttggtctggttgaggaagcggctaagacggctcctggaaagaagaggcctgtagagcagtctcctcaggaaccggactcctccgcgggtattggcaaatcgggtgcacagcccgctaaaaagagactcaatttcggtcagactggcgacacagagtcagtcccagaccctcaaccaatcggagaacctcccgcagccccctcaggtgtgggatctcttacaatggcttcaggtggtggcgcaccagtggcagacaataacgaaggtgccgatggagtgggtagttcctcgggaaattggcattgcgattcccaatggctgggggacagagtcatcaccaccagcacccgaacctgggccctgcccacctacaacaatcacctctacaagcaaatctccaacagcacatctggaggatcttcaaatgacaacgcctacctcggctacagcaccccctgggggtattttgacttcaacagattccactgccacttctcaccacgtgactggcagcgactcatcaacaacaactggggattccggcctaagcgactcaacttcaagctcttcaacattcaggtcaaagaggttacggacaacaatggagtcaagaccatcgccaataaccttaccagcacggtccaggtcttcacggactcagactatcagctcccgtacgtgctcgggtcggctcacgagggctgcctcccgccgttcccagcggacgttttcatgattcctcagtacgggtatctgacgcttaatgatggaagccaggccgtgggtcgttcgtccttttactgcctggaatatttcccgtcgcaaatgctaagaacgggtaacaacttccagttcagctacgagtttgagaacgtacctttccatagcagctacgctcacagccaaagcctggaccgactaatgaatccactcatcgaccaatacttgtactatctctcaaagactattaacggttctggacagaatcaacaaacgctaaaattcagtgtggccggacccagcaacatggctgtccagggaagaaactacatacctggacccagctaccgacaacaacgtgtctcaaccactgtgactcaaaacaacaacagcgaatttgcttggcctggagcttcttcttgggctctcaatggacgtaatagcttgatgaatcctggacctgctatggccagccacaaagaaggagaggaccgtttctttcctttgtctggatctttaatttttggcaaacaaggaactggaagagacaacgtggatgcggacaaagtcatgataaccaacgaagaagaaattaaaactactaacccggtagcaacggagtcctatggacaagtggccacaaaccaccagagtgcccaagcacaggcgcagaccggctgggttcaaaaccaaggaatacttccgggtatggtttggcaggacagagatgtgtacctgcaaggacccatttgggccaaaattcctcacacggacggcaactttcacccttctccgctgatgggagggtttggaatgaagcacccgcctcctcagatcctcatcaaaaacacacctgtacctgcggatcctccaacggccttcaacaaggacaagctgaactctttcatcacccagtattctactggccaagtcagcgtggagatcgagtgggagctgcagaaggaaaacagcaagcgctggaacccggagatccagtacacttccaactattacaagtctaataatgttgaatttgctgttaatactgaaggtgtatatagtgaaccccgccccattggcaccagatacctgactcgtaatctg

SEQ ID NO: 3034 - DNA, 2208 bp, Artificial Sequence
  Synthetic polynucleotide
atggctgccgatggttatcttccagattggctcgaggacaaccttagtgaaggaattcgcgagtggtgggctttgaaacctggagcccctcaacccaaggcaaatcaacaacatcaagacaacgctcgaggtcttgtgcttccgggttacaaataccttggacccggcaacggactcgacaagggggagccggtcaacgcagcagacgcggcggccctcgagcacgacaaggcctacgaccagcagctcaaggccggagacaacccgtacctcaagtacaaccacgccgacgccgagttccaggagcggctcaaagaagatacgtcttttgggggcaacctcgggcgagcagtcttccaggccaaaaagaggcttcttgaacctcttggtctggttgaggaagcggctaagacggctcctggaaagaagaggcctgtagagcagtctcctcaggaaccggactcctccgcgggtattggcaaatcgggtgcacagcccgctaaaaagagactcaatttcggtcagactggcgacacagagtcagtcccagaccctcaaccaatcggagaacctcccgcagccccctcaggtgtgggatctcttacaatggcttcaggtggtggcgcaccagtggcagacaataacgaaggtgccgatggagtgggtagttcctcgggaaattggcattgcgattcccaatggctgggggacagagtcatcaccaccagcacccgaacctgggccctgcccacctacaacaatcacctctacaagcaaatctccaacagcacatctggaggatcttcaaatgacaacgcctacttcggctacagcaccccctgggggtattttgacttcaacagattccactgccacttctcaccacgtgactggcagcgactcatcaacaacaactggggattccggcctaagcgactcaacttcaagctcttcaacattcaggtcaaagaggttacggacaacaatggagtcaagaccatcgccaataaccttaccagcacggtccaggtcttcacggactcagactatcagctcccgtacgtgctcgggtcggctcacgagggctgcctcccgccgttcccagcggacgttttcatgattcctcagtacgggtatctgacgcttaatgatggaagccaggccgtgggtcgttcgtccttttactgcctggaatatttcccgtcgcaaatgctaagaacgggtaacaacttccagttcagctacgagtttgagaacgtacctttccatagcagctacgctcacagccagagcctggaccgactaatgaatccactcatcgaccaatacttgtactatctctcaaagactattaacggttctggacagaatcaacaaacgctaaaattcagtgtggccggacccagcaacatggctgtccagggaagaaactacatacctggacccagctaccgacaacaacgtgtctcaaccactgtgactcaaaacaacaacagcgaatttgcttggcctggagcttcttcttgggctctcaatggacgtaatagcttgatgaatcctggacctgctatggccagccacaaagaaggagaggaccgtttctttcctttgtctggatctttaatttttggcaaacaaggaactggaagagacaacgtggatgcggacaaagtcatgataaccaacgaagaagaaattaaaactactaacccggtagcaacggagtcctatggacaagtggccacaaaccaccagagtgcccaagcacaggcgcagaccggctgggttcaaaaccaaggaatacttccgggtatggtttggcaggacagagatgtgtacctgcaaggacccatttgggccaaaattcctcacacggacggcaactttcacccttctccgctgatgggagggtttggaatgaagcacccgcctcctcagatcctcatcaaaaacacacctgtacctgcggatcctccaacggccttcaacaaggacaagctggactctttcatcacccagtattctactggccaagtcagcgtggagatcgagtgggagctgcagaaggaaaacagcaagcgctggaacccggtgatccagtacacttccaactattacaagtctaataatgttgaatttgctgttaatactgaaggtgtatatagtgaaccccgccccattggcaccagatacctgactcgtaatctg

SEQ ID NO: 3035 - DNA, 2208 bp, Artificial Sequence
  Synthetic polynucleotide
atggctgccgatggttatcttccagattggctcgaggacaacctctctgagggcattcgcgagtggtgggacttgaaacctggagccccgaagcccaaagccaaccagcaaaagcaggacgacggccggggtctggtgcttcctggctacaagtacctcggacccttcaacggactcgacaagggggagcccgtcaacgcggcggacgcagcggccctcgagcacgacaaggcctacgaccagcagctcaaagcgggtgacaatccgtacctgcggtataaccacgccgacgccgagtttcaggagcgtctgcaagaagatacgtcttttgggggcaacctcgggcgagcagtcttccaggccaagaagcgggttctcgaacctctcggtctggttgaggaaggcgctaagacggctcctggaaagaaacgtccggtagagcagtcgccacaagagccagactcctcctcgggcatcggcaagacaggccagcagcccgctaaaaagagactcaattttggtcagactggcgactcagagtcagtccccgatccacaacctctcggagaacctccagcaacccccgctgctgtggggcctactacaatggcttcaggcggtggcgcaccaatggcagacaataacgaaggcgtcgacggagtgggtaatgcctcaggaaattggcattgcgattccacatggctgggcgacagagtcatcaccaccagcacccgcacctgggccttgcccacctacaataaccacctctacaagcaaatctccagtgcttcaacgggggccagcaacgacaaccactacttcggctacagcaccccctgggggtattttgatttcaacagattccactgccacttttcaccacgtgactggcagcgactcatcaacaacaattggggattccggcccaagagactcaacttcaaactcttcaacatccaagtcaaggaggtcacgacgaatgatggcgttacaaccatcgctaataaccttaccagcacggttcaagtcttctcggactcggagtaccagcttccgtacgtcctcggctctgcgcaccagggctgcctccctccgttcccggcggacgtgttcatgattccgcaatacggctacctgacgctcaacaatggcagccaagccgtgggacgttcatccttttactgcctggaatatttcccttctcagatgctgagaacgggcaacaactttaccttcagctacacctttgaggaagtgcctttccacagcagctacgcgcacagccagagcctggaccggctgatgaatcctctcatcgaccaatacctgtattacctgaacagaactcaaaatcagtccggaagtgcccaaaacaaggacttgctgtttagccgtgggtctccagctggcatgtctgttcagcccaaaaactggctacctggaccctgttatcggcagcagcgcgtttctaaaacaaaaacagacaacaacaacagcaattttacctggactggtgcttcaaaatataacctcaatgggcgtgaatccatcatcaaccctggcactgctatggcctcacacaaagacgacgaagacaagttctttcccatgagcggtgtcatgatttttggaaaagagagcgccggagcttcaaacactgcattggacaatgtcatgattacagacgaagaggaaattaaagccactaaccctgtggccaccgaaagatttgggaccgtggcagtcaatttccagagcagcagcacagaccctgcgaccggagatgtgcatgctatgggagcattacctggcatggtgtggcaagatagagacgtgtacctgcagggtcccatttgggccaaaattcctcacacagatggacactttcacccgtctcctcttatgggcggctttggactcaagaacccgcctcctcagatcctcatcaaaaacacgcctgttcctgcgaatcctccggcggagttttcagccacaaagcttgcttcattcatcacccaatactccacaggacaagtgagtgtggaaattgaatgggagctgcagaaagaaaacagcaagcgctggaatcccgaagtgcagtacacatccaattatgcaaaatctgccaacgttgattttactgtggacaacaatggactttatactgagcctcgccccattggcacccgttaccttacccgtcccctg

SEQ ID NO: 3036 - DNA, 2208 bp, Artificial Sequence
  Synthetic polynucleotide
atggctgccgatggttatcttccagattggctcgaggacaacctctctgagggcattcgcgagtggtgggacttgaaacctggagccccgaagcccaaagccaaccagcaaaagcaggacgacggccggggtctggtgcttcctggctacaagtacctcggacccttcaacggactcgacaagggggagcccgtcaacgcggcggacgcagcggccctcgagcacgacaaggcctacgaccagcagctcaaagcgggtgacaatccgtacctgcggtataaccacgccgacgccgagtttcaggagcgtctgcaagaagatacgtcttttgggggcaacctcgggcgagcagtcttccaggccaagaagcgggttctcgaacctctcggtctggttgaggaaggcgctaagacggctcctggaaagagacgtccggtagagcagtcgccacaagagccagactcctcctcgggcatcggcaagacaggccagcagcccgctaaaaagagactcaattttggtcagactggcgactcagagtcagtccccgatccacaacctctcggagaacctccagcaacccccgctgctgtgggacctactacaatggcttcaggcggtggcgcaccaatggcagacaataacgaaggcgccgacggagtgggtaatgcctcaggaaattggcattgcgattccacatggctgggcgacagagtcatcaccaccagcacccgcacctgggccttgcccacctacaataaccacctctacaagcaaatctccagtgcttcaacgggggccagcaacgacaaccactacttcggctacagcaccccctgggggtattttgatttcaacagattccactgccacttttcaccacgtgactggcagcgactcatcaacaacaattggggattccggcccaagagactcaacttcaaactcttcaacatccaagtcaaggaggtcacgacgaatgatggcgtcacaaccatcgctaataaccttaccagcacggttcaagtcttctcggactcggagtaccagcttccgtacgtcctcggctctgcgcaccagggctgcctccctccgttcccggcggacgtgttcatgattccgcaatacggctacctgacgctcaacaatggcagccaagccgtgggacgttcatccttttactgcctggaatatttcccttctcagatgctgagaacgggcaacaactttaccttcagctacacctttgaggaagtgcctttccacagcagctacgcgcacagccagagcctggaccggctgatgaatcctctcatcgaccaatacctgtattacctgaacagaactcaaaatcagtccggaagtgcccaaaacaaggacttgctgtttagccgtgggtctccagctggcatgtctgttcagcccaaaaactggctacctggaccctgttatcggcagcagcgcgtttctaaaacaaaaacagacaacaacaacagcaattttacctggactggtgcttcaaaatataacctcaatgggcgtgaatccatcatcaaccctggcactgctatggcctcacacaaagacgacgaagacaagttctttcccatgagcggtgtcatgatttttggaaaagagagcgccggagcttcaaacactgcattggacaatgtcatgattacagacgaagaggaaattaaagccactaaccctgtggccaccgaaagatttgggaccgtggcagtcaatttccagagcagcagcacagaccctgcgaccggagatgtgcatgctatgggagcattacctggcatggtgtggcaagatagagacgtgtacctgcagggtcccatttgggccaaaattcctcacacagatggacactttcacccgtctcctcttatgggcggctttggactcaagaacccgcctcctcagatcctcatcaaaaacacgcctgttcctgcgaatcctccggcggagttttcagctacaaagtttgcttcgttcatcacccaatactccacaggacaagtgagtgtggaaattgaatgggagctgcagaaagaaaacagcaagcgctggaatcccgaagtgcagtacacatccaattatgcaaaatctgccaacgttgattttactgtggacaacaatggactttatactgagcctcgccccattggcacccgttaccttacccgtcccctg

SEQ ID NO: 3037 - DNA, 2208 bp, Artificial Sequence
  Synthetic polynucleotide
atggctgccgatggttatcttccagattggctcgaggacaacctctctgagggcattcgcgagtggtgggacttgaaacctggagccccgaagcccaaagccaaccagcaaaagcaggacgacggccggggtctggtgcttcctggctacaagtacctcggacccttcaacggactcgacaagggggagcccgtcaacgcggcggacgcagcggccctcgagcacgacaaggcctacgaccagcagctcaaagcgggtgacaatccgtacccgcggtataaccacgccgacgccgagtttcaggagcgtctgcaagaagatacgtcttttgggggcaacctcgggcgagcagtcttccaggccaagaagcgggttctcgaacctctcggtctggttggggaaggcgctaagacggctcctggaaagaaacgtccggtagagcagtcgccacaagagccagactcctcctcgggcatcggcaagacaggccagcagcccgctaaaaagagactcaattttggtcagactggcgactcagagtcagtccccgatccacaacctctcggagaacctccagcaacccccgctgctgtgggacctactacaatggcttcaggcggtggcgcaccaatggcagacaataacgaaggcgccgacggagtgggtaatgcctcaggaaattggcattgcgattccacatggctgggcgacagagtcatcaccaccagcacccgcacctgggccttgcccacctacaataaccacctctacaagcaaatctccagtgcttcaacgggggccagcaacgacaaccactacttcggctacagcaccccctgggggtattttgatttcaacagattccactgccacttttcaccacgtgactggcagcgactcatcaacaacaattggggattccggcccaagagactcaacttcaaactcttcaacatccaagtcaaggaggtcacgacgaatgatggcgtcacaaccatcgctaataaccttaccagcacggttcaagtcttctcggactcggagtaccagcttccgtacgtcctcggctctgcgcaccagggctgcctccctccgttcccggcggacgtgttcatgattccgcaatacggctacctgacgctcaacaatggcagccaagccgtgggacgttcatccttttactgcctggaatatttcccttctcagatgctgagaacgggcaacaactttaccttcagctacacctttgaggaagtgcctttccacagcagctacgcgcacagccagagcctggaccggctgatgaatcctcccatcgaccaatacctgtattacctgaacagaactcaaaatcagtccggaagtgcccaaaacaaggacttgctgtttagccgtgggtctccagctggcatgtctgttcagcccaaaaactggctacctggaccctgttatcggcagcagcgcgtttctaaaacaaaaacagacaacaacaacagcaattttacctggactggtgcttcaaaatataacctcaatgggcgtgaatccatcatcaaccctggcactgctatggcctcacacaaagacgacgaagacaagttctttcccatgagcggtgtcatgatttttggaaaagagagcgccggagcttcaaacactgcattggacaatgtcatgattacagacgaagaggaaattaaagccactaaccctgtggccaccgaaagatttgggaccgtggcagtcaatttccagagcagcagcacagaccctgcgaccggagatgtgcatgctatgggagcattacctggcatggtgtggcaagatagagacgtgtacctgcagggtcccatttgggccaaaattcctcacacagatggacactttcacccgtctcctcttatgggcggctttggactcaagaacccgcctcctcagatcctcatcaaaaacacgcctgttcctgcgaatcctccggcggagttttcagctacaaagtttgcttcattcatcacccaatactccacaggacaagtgagtgtggaaattgaatgggagctgcagaaagaaaacagcaagcgctggaatcccgaagtgcagtacacatccaattatgcaaaatctgccaacgttgattttactgtggacaacaatggactttatactgagcctcgccccattggcacccgttaccttacccgtcccctg

SEQ ID NO: 3038 - DNA, 2208 bp, Artificial Sequence
  Synthetic polynucleotide
atggctgccgatggttatcttccagattggctcgaggacaacctctctgagggcattcgcgagtggtgggacttgaaacctggagccccgaagcccaaagccaaccagcaaaagcaggacgacggccggggtctggtgcttcctggctacaagtacctcggacccttcaacggactcgacaagggggagcccgtcaacgcggcggacgcagcggccctcgagcacgacaaggcctacgaccagcagctcaaagcgggtgacaatccgtacctgcggtataaccacgccgacgccgagtttcaggagcgtctgcaagaagatacgtcttttgggggcaacctcgggcgagcagtcttccaggccaagaagcgggttctcgaacctctcggtctggttgaggaaggcgctaagacggctcctggaaagaaacgtccggtagagcagtcgccacaagagccagactcctcctcgggcatcggcaagacaggccagcagcccgctaaaaagagactcaattttggtcagactggcgactcagagtcagtccccgatccacgacctctcggagaacctccagcaacccccgctgctgtgggacctactacaatggcttcaggcggtggcgcaccaatggcagacaataacgaaggcgccgacggagtgggtaatgcctcaggaaattggcattgcgattccacatggctgggcgacagagtcatcaccaccagcacccgcacctgggccttgcccacctacaataaccacctctacaagcaaatctccagtgcttcaacgggggccagcaacgacaaccactacttcggctacagcaccccctgggggtattttgatttcaacagattccactgccacttttcaccacgcgactggcagcgactcatcaacaacaattggggattccggcccaagagactcaacttcaaactcttcaacatccaagtcaaggaggtcacgacgaatgatggcgtcacaaccatcgctaataaccttaccagcacggttcaagtcttctcggactcggagtaccagcttccgtacgtcctcggctctgcgcaccagggctgcctccctccgttcccggcggacgtgttcatgattccgcaatacggctacctgacgctcaacaatggcagccaagccgtgggacgttcatccttttactgcctggaatatttcccttctcagatgctgagaacgggcaacaactttaccttcagctacacctttgaggaagtgcctttccacagcagctacgcgcacagccagagcctggaccggctgatgaatcctctcatcgaccaatacctgtattacctgaacagaactcaaaatcagtccggaagtgcccaaaacaaggacttgctgtttagccgtgggcctccagctggcatgtctgttcagcccaaaaactggctacctggaccctgttatcggcagcagcgcgtttctaaaacaaaaacagacaacaacaacagcaattttacctggactggtgcttcaaaatataacctcaatgggcgtgaatccatcatcaaccctggcactgctatggcctcacacaaagacgacgaagacaagttctttcccatgagcggtgtcatgatttttggaaaagagagcgccggagcttcaaacactgcattggacaatgtcatgattacggacgaagaggaaattaaagccactaaccctgtggccaccgaaagatttgggaccgtggcagtcaatttccagagcagcagcacagaccctgcgaccggagatgtgcatgctatgggagcattacctggcatggtgtggcaagatagagacgtgtacctgcagggtcccatttgggccaaaattcctcacacagatggacactttcacccgtctcctcttatgggcggctttggactcaagaacccgcctcctcagatcctcatcaaaaacacgcctgttcctgcgaatcctccggcggagttttcagctacaaagtttgcttcattcatcacccaatactccacaggacaagtgagtgtggaaattgaatgggagctgcagaaagaaaacagcaagcgctggaatcccgaagtgcagtacacatccaattatgcaaaatctgccaacgttgattttactgtggacaacaatggactttatactgagcctcgccccattggcacccgttaccttacccgtcccctg

SEQ ID NO: 3039 - DNA, 2208 bp, Artificial Sequence
  Synthetic polynucleotide
atggctgccgatggttatcttccagattggctcgaggacaacctctctgagggcattcgcgagtggtgggacttgaaacctggagccccgaagcccaaagccaaccagcaaaagcaggacgacggccggggtctggtgcttcctggctacaagtacctcggacccttcaacggactcgacaagggggagcccgtcaacgcggcggacgcagcggccctcgagcacgacaaggcctacgaccagcagctcaaagcgggtgacaatccgtacctgcggtataaccacgccgacgccgagtttcaggagcgtctgcaagaagatacgtcttttgggggcaacctcgggcgagcagtcttccaggccaagaagcgggttctcgaacctctcggtctggttgaggaaggcgctaagacggctcctggaaagaaacgtccggtagagcagtcgccacaagagccagactcctcctcgggcatcggcaagacaggccagcagcccgctaaaaagagactcaattttggtcagactggcggctcagagtcagtccccgatccacaacctctcggagaacctccagcaacccccgctgctgtgggacctactacaatggcttcaggcggtggcgcaccaatggcagacaataacgaaggcgccgacggagtgggtaatgcctcaggaaattggcattgcgattccacatggctgggcgacagagtcatcaccaccagcacccgcacctgggccttgcccacctacaataaccacctctacaagcaaatctccagtgcttcaacgggggccagcaacgacaaccactacttcggctacagcaccccctgggggtattttgatttcaacagattccactgccacttttcaccacgtgactggcagcgactcatcaacaacaattggggattccggcccaagagactcaacttcaaactcttcaacatccaagtcaaggaggtcacgacgaatgatggcgtcacaaccatcgctaataaccttaccagcacggttcaagtcttctcggactcggagtaccagcttccgtacgtcctcggctctgcgcaccagggctgcctccctccgttcccggcggacgtgttcatgattccgcaatacggctacctgacgctcaacaatggcagccaagccgtgggacgttcatccttttactgcctggaatatttcccttctcagatgctgagaacgggcaacaactttaccttcagctacacctttgaggaagtgcctttccacagcagctacgcgcacagccagagcctggaccggctgatgaatcctcccatcgaccaatacctgtattacctgaacagaactcaaaatcagtccgggagtgcccaaaacaaggacttgctgtttagccgtgggtctccagctggcatgtctgttcagcccaaaaactggctacctggaccctgttatcggcagcagcgcgtttctaaaacaaaaacagacaacaacaacagcaattttacctggactggtgcttcaaaatataacctcaatgggcgtgaatccatcatcaaccctggcactgctatggcctcacacaaagacgacgaagacaagttctttcccatgagcggtgtcatgatttttggaaaagagagcgccggagcttcaaacactgcattggacaatgtcatgattacagacgaagaggaaattaaagccactaaccctgtggccaccgaaagatttgggaccgtggcagtcaatttccagagcagcagcacagaccctgcgaccggagatgtgcatgctatgggagcattacctggcatggtgtggcaagatagagacgtgtacctgcagggtcccatttgggccaaaattcctcacacagatggacactttcacccgtctcctcttatgggcggctttggactcaagaacccgcctcctcagatcctcatcaaaaacacgcctgttcctgcgaatcctccggcggagttttcagctacaaagtttgcttcattcatcacccaatactccacaggacaagtgagtgtggaaattgaatgggagctgcagaaagaaaacagcaagcgctggaatcccgaagtgcagtacacatccaattatgcaaaatctgccaacgttgactttactgtggacaacaatggactttatactgagcctcgccccattggcacccgttaccttacccgtcccctg

SEQ ID NO: 3040 - DNA, 2208 bp, Artificial Sequence
  Synthetic polynucleotide
atggctgccgatggttatcttccagattggctcgaggacaacctctctgagggcattcgcgagtggtgggacttgaaacctggagccccgaagcccaaagccaaccagcaaaagcaggacgacggccggggtctggtgcttcctggctacaagtacctcggacccttcaacggactcgacaagggggagcccgtcaacgcggcggacgcagcggccctcgagcacgacaaggcctacgaccagcagctcaaagcgggtgacaatccgtacctgcggtataaccacgccgacgccgagtttcaagagcgtctgcaagaagatacgtcttttgggggcaacctcgggcgagcagtcttccaggccaagaagcgggttctcgaacctctcggtctggttgaggaaggcgctaagacggctcctggaaagaaacgtccggtagagcagtcgccacaagagccagactcctcctcgggcatcggcaagacaggccagcagcccgctaaaaagagactcaattttggtcagactggcgactcagagtcagtccccgatccgcaacctctcggagaacctccagcaacccccgctgctgtgggacctactacaatggcttcaggcggtggcgcaccaatggcagacaataacgaaggcgccgacggagtgggtaatgcctcaggaaattggcattgcgattccacatggctgggcgacagagtcatcaccaccagcacccgcacctgggccttgcccacctacaataaccacctctacaagcaaatctccagtgcttcaacgggggccagcaacgacaaccactacttcggctacagcaccccctgggggtattttgatttcaacagattccactgccacttttcaccacgtgactggcagcgactcatcaacaacaattggggattccggcccaagagactcaacttcaaactcttcaacatccaagtcaaggaggtcacgacgaatgatggcgtcacaaccatcgctaataaccttaccagcacggttcaagtcttctcggactcggagtaccagcttccgtacgtcctcggctctgcgcaccagggctgcctccctccgttcccggcggacgtgttcatgattccgcaatacggctacctgacgctcaacaatggcagccaagccgtgggacgttcatccttttactgcctggaatatttcccttctcagatgctgagaacgggcaacaactttaccttcagctacacctttgaggaagtgcctttccacagcagctacgcgcacagccagagcctggaccggctgatgaatcctctcatcgaccaatacctgtattacctgaacagaactcaaaatcagtccggaagtgcccaaaacaaggacttgctgtttagccgtgggtctccagctggcatgtctgttcagcccaaaaactggctacctggaccctgttatcggcagcagcgcgtttctaaaacaaaaacagacaacaacaacagcaattttacctggactggtgcttcaaaatataacctcaatgggcgtgaatccatcatcaaccctggcactgctgtggcctcacacaaagacgacgaagacaagttctttcccatgagcggtgtcatgatttttggaaaagagagcgccggagcttcaaacactgcattggacaatgtcatgattacagacgaagaggaaattaaagccactaaccctgtggccaccgaaagatttgggaccgtggcagtcaatttccagagcagcagcacagaccctgcgaccggagatgtgcatgctatgggagcattacctggcatggtgtggcaagatagagacgtgtacctgcagggtcccatttgggccaaaattcctcacacagatggacactttcacccgtctcctcttatgggcggctttggactcaagaacccgcctcctcagatcctcatcaaaaacacgcctgttcctgcgaatcctccggcggagttttcagctacaaagtttgcttcattcatcacccaatactccacaggacaagtgagtgtggaaattgaatgggagctgcagaaagaaaacagcaagcgctggaatcccgaagtgcagtacacatccaattatgcaaaatctgccaacgttgattttactgtggacaacaatggactttatactgagcctcgccccattggcacccgttaccttacccgtcccctg

SEQ ID NO: 3041 - DNA, 2208 bp, Artificial Sequence
  Synthetic polynucleotide
atggctgccgatggttatcttccagattggctcgaggacaacctctctgagggcattcgcgagtggtgggacttgaaacctggagccccgaagcccaaagccaaccagcaaaagcaggacgacggccggggtctggtgcttcctggctacaagtacctcggacccttcaacggactcgacaagggggagcccgtcaacgcggcggacgcagcggccctcgagcacgacaaggcctacgaccagcagctcaaagcgggtgacaatccgtacctgcggtataaccacgccgacgccgagtttcaggagcgtctgcaagaagatacgtcttttgggggcaacctcgggcgagcagtcttccaggccaagaagcgggttctcgaacctctcggtctggttgaggaaggcgctaagacggctcctggaaagaaacgtccggtagagcagtcgccacaagagccagactcctcctcgggcatcggcaagacaggccagcagcccgctaaaaagagactcaattttggtcagactggcgactcagagtcagtccccgatccacaacctctcggagaacctccagcaacccccgctgctgtgggacctactacaatggcttcaggcggtggcgcaccaatggcagacaataacgaaggcgccgacggagtgggtaatgcctcaggaaattggcattgcgattccacatggctgggcgacagagtcatcaccaccagcacccgcacctgggccttgcccacctacaataaccacctctacaagcaaatctccagtgcttcaacgggggccagcaacgacaaccactacttcggctacagcaccccctgggggtattttgatttcaacagattccactgccacttttcaccacgtgactggcagcaactcatcaacaacaattggggattccggcccaagagactcaacttcaaactcttcaacatccaagtcaaggaggtcacgacgaatgatggcgtcacaaccatcgctaataaccttaccagcacggttcaagtcttctcggactcggagtaccagcttccgtacgtcctcggctctgcgcaccagggctgcctccctccgttcccggcggacgtgttcatgattccgcaatacggctacctgacgctcaacaatggcagccaagccgtgggacgttcatccttttactgcctggaatatttcccttctcagatgctgagaacgggcaacaactttaccttcagctacacctttgaggaagtgcctttccacagcagctacgcgcacagccagagcctggaccggctgatgaatcctctcatcgaccaatacctgtattacctgaacagaactcaaaatcagtccggaagtgcccaaaacaaggacttgctgtttagccgtgggtctccagctggcatgtctgttcagcccaaaaactggctacctggaccctgttatcggcagcagcgcgtttctaaaacaaaaacagacaacaacaacagcaattttacctggactggtgcttcaaaatataacctcaatgggcgtgaatccatcatcaaccctggcactgctatggcctcacacaaagacgacgaagacaagttctttcccatgagcggtgtcatgatttttggaaaagagagcgccggagcttcaaacactgcattggacaatgtcatgattacagacgaagaggaaattaaagccactaaccctgtggccaccgaaagatttgggaccgtggcagtcaatttccagagcaccagcacagaccctgcgaccggagatgtgcatgctatgggagcattacctggcatggtgtggcaagatagagacgtgtacctgcagggtcccatttgggccaaaattcctcacacagatggacactttcacccgtctcctcttatgggcggctttggactcaagaacccgcctcctcagatcctcatcaaaaacacgcctgttcctgcgaatcctccggcggagttttcagctacaaagtttgcttcattcatcacccaatactccacaggacaagtgagtgtggaaattgaatgggagctgcagaaagaaaacagcaagcgctggaatcccgaagtgcagtacacatccaattatgcaaaatctgccgacgttgattttactgtggacaacaatggactttatactgagcctcgccccattggcacccgttaccttacccgtcccctg

SEQ ID NO: 3042 - DNA, 2208 bp, Artificial Sequence
  Synthetic polynucleotide
atggctgccgatggttatcttccagattggctcgaggacaacctctctgagggcattcgcgagtggtgggacttgaaacctggagccccgaagcccaaagccaaccagcaaaagcaggacgacggccggggtctggtgcttcctggctacaagtacctcggacccttcaacggactcgacaagggggagcccgtcaacgcggcggacgcagcggccctcgagcacgacaaggcctacgaccagcagctcaaagcgggtgacaatccgtacctgcggtataaccacgccgacgccgagtttcaagagcgtctgcaagaagatacgtcttttgggggcaacctcgggcgagcagtcttccaggccaagaagcgggttctcgaacctctcggtctggttgaggaaggcgctaagacggctcctggaaagaaacgtccggtagagcagtcgccacaagagccagactcctcctcgggcatcggcaagacaggccagcagcccgctaaaaagagactcaattttggtcagactggcgactcagagtcagtccccgatccgcaacctctcggagaacctccagcaacccccgctgctgtgggacctactacaatggcttcaggcggtggcgcaccaatggcagacaataacgaaggcgccgacggagtgggtaatgcctcaggaaattggcattgcgattccacatggctgggcgacagagtcatcaccaccagcacccgcacctgggccttgcccacctacaataaccacctctacaagcaaatctccagtgcttcaacgggggccagcaacgacaaccactacttcggctacagcaccccctgggggtattttgatttcaacagattccactgccacttttcaccacgtgactggcagcgactcatcaacaacaattggggattccggcccaagagactcaacttcaaactcttcaacatccaagtcaaggaggtcacgacgaatgatggcgtcacaaccatcgctaataaccttaccagcacggttcaagtcttctcggactcggagtaccagcctccgtacgtcctcggctctgcgcaccagggctgcctccctccgttcccggcggacgtgttcatgattccgcaatacggccacctgacgctcaacaatggcagccaagccgtgggacgttcatccttttactgcctggaatatttcccttctcagatgctgagaacgggcaacaactttaccttcagctacacctttgaggaagtgcctttccacagcagctacgcgcacagccagagcctggaccggctgacgaatcctctcatcgaccaatacctgtattacctgaacagaactcaaaatcagtccggaagtgcccaaaacaaggacttgctgtttagccgtgggtctccagctggcatgtctgttcagcccaaaaactggctacctggaccctgttatcggcagcagcgcgtttctaaaacaaaaacagacaacaacaacagcaattttacctggactggtgcttcaaaatataacctcaatgggcgtgaatccatcatcaaccctggcactgctatggcctcacacaaagacgacgaagacaagttctttcccatgagcggtgtcatgatttttggaaaagagagcgccggagcttcaaacactgcattggacaatgtcatgattacagacgaagaggaaattaaagccactaaccctgtggccaccgaaagatttgggaccgtggcagtcaatttccagagcagcagcacagaccctgcgaccggagatgtgcatgctatgggagcattacctggcatggtgtggcaagatagagacgtgtacctgcagggtcccatttgggccaaaattcctcacacagatggacactttcacccgtctcctcttatgggcggctttggactcaagaacccgcctcctcagatcctcatcaaaaacacgcctgttcctgcgaatcctccggcggagttttcagctacaaagtttgcttcattcatcacccaatactccacaggacaagtgagtgtggaaattgaatgggagctgcagaaagaaaacagcaagcgctggaatcccgaagtgcagtacacatccaattatgcaaaatctgccaacgttgattttactgtggacaacaatggactttatactgagcctcgccccattggcacccgttaccttacccgtcccctg

SEQ ID NO: 3043 - DNA, 2208 bp, Artificial Sequence
  Synthetic polynucleotide
atggctgccgatggttatcttccagattggctcgaggacaacctctctgagggcattcgcgagtggtgggacttgaaacctggagccccgaagcccaaagccaaccagcaagagcaggacgacggccggggtctggtgcttcctggctacaagtacctcggacccttcaacggactcgacaagggggagcccgtcaacgcggcggacgcagcggccctcgagcacgacaaggcctacgaccagcagctcaaagcgggtgacaatccgtacctgcggtataaccacgccgacgccgagtttcaggagcgtctgcaagaagatacgtcttttgggggcaacctcgggcgagcagtcttccaggccaagaagcgggttctcgaacctctcggtctggttgaggaaggcgctaagacggctcctggaaagaaacgtccggtagagcagtcgccacaagagccagactcctcctcgggcatcggcaagacaggccagcagcccgctaaaaagagactcaattttggtcagactggcgactcagagtcagtccccgatccacaacctctcggagaacctccagcaacccccgctgctgtgggacctactacaatggcttcaggcggtggcgcaccaatggcagacaataacgaaggcgccgacggagtgggtaatgcctcaggaaattggcattgcgattccacatggctgggcgacagagtcatcaccaccagcacccgcacctgggccttgcccacctacaataaccacctctacaagcaaatctccagtgcttcaacgggggccagcaacgacaaccactacttcggctacagcaccccctgggggtattttgatttcaacagattccactgccacttttcaccacgtgactggcagcgactcatcaacaacaattggggattccggcccaagagactcaacttcaaactcttcaacatccaagtcaaggaggtcacgacgaatgatggcgtcacaaccatcgctaataaccttaccagcacggttcaagtcttctcggactcggagtaccagcttccgtacgtcctcggctctgcgcaccagggctgcctccctccgttcccggcggacgtgttcatgattccgcaatacggctacctgacgctcaacaatggcagccaagccgtgggacgttcatccttttactgcctggaatatttcccttctcagatgctgagaacgggcaacaactttaccttcagctacacctttgaggaagtgcctttccacagcagctacgcgcacagccagagcctggaccggctgatgaatcctctcatcgaccaatacctgtattacctgaacagaactcaaaatcagtccggaagtgcccaaaacaaggacttgctgtttagccgtgggtctccagctggcatgtctgttcagcccaaaaactggctacctggaccctgttatcggcagcagcgcgtttctaaaacaaaaacagacaacaacaacagcaattttacctggactggtgcttcaaaatataacctcaatgggcgtgaatccatcatcaaccctggcactgctatggcctcacacaaagacgacgaagacaagttctttcccatgagcggtgtcatgatttttggaaaagagagcgccggagcttcaaacactgcattggacaatgtcatgattacagacgaagaggaaattaaagccactaaccctgtggccaccgaaagatttgggaccgtggcagtcaatttccagagcagcagcacagaccctgcgaccggagatgtgcatgctacgggaacattacctggcatggtgtggcaagatagagacgtgtacctgcagggtcccatttgggccaaaattcctcacacagatggacactttcacccgtctcctcttatgggcggctttggactcaagaacccgcctcctcagatcctcatcaaaaccacgcctgttcctgcgaatcctccggcggagttttcagctacaaagtttgcttcattcatcacccagtactccacaggacaagtgagtgtggaaattgaatgggagctgcagaaagaaaacagcaagcgctggaatcccgaagtgcagtacacatccaattatgcaaaatctgccaacgttgattttactgtggacgacaatggactttatactgagcctcgccccattggcacccgttaccttacccgtcccctg

SEQ ID NO: 3044 - DNA, 2208 bp, Artificial Sequence
  Synthetic polynucleotide
atggctgccgatggttatcttccagattggctcgaggacaacctctctgagggcattcgcgagtggtgggacttgaaacctggagccccgaagcccaaagccaaccagcaaaagcaggacgacggccggggtctggtgcttcctggctacaagtacctcggacccttcaacggactcgacaagggggagcccgtcaacgcggcggacgcagcggccctcgagcacgacaaggcctacgaccagcagctcaaagcgggtgacaatccgtacctgcggtataaccacgccgacgccgagtttcaggagcgtctgcaagaagatacgtcttttgggggcaacctcgggcgagcagtcttccaggccaagaagcgggttctcgaacctctcggtctggttgaggaaggcgctaagacggctcctggaaagaaacgtccggtagagcagtcgctacaagagccagactcctcctcgggcatcggcaagacaggccagcagcccgctaaaaagagactcaattttggtcagactggcgactcagagtcagtccccgatccacaacctctcggagaacctccagcaacccccgctgctgtgggacctactacaatggcttcaggcggtggcgcaccaatggcagacaataacgaaggcgccgacggagtgggtaatgcctcaggaaattggcattgcgattccacatggctgggcgacagagtcatcaccaccagcacccgcacctgggccttgcccacctacaataaccacctctacaagcaaatctccagtgcttcaacgggggccagcaacgacaaccactacttcggctacagcaccccctgggggtattttgatttcaacagattccactgccacttttcaccacgtgactggcagcgactcatcaacaacaattggggattccggcccaagagactcaacttcaaactcttcaacatccaagtcaaggaggtcacgacgaatgatggcgtcacaaccatcgctaataaccttaccagcacggttcaagtcttctcggactcggagtaccagcttccgtacgtcctcggctctgcgcaccagggctgcctccctccgttcccggcggacgtgttcatgattccgcaatacggctacctgacgctcaacaatggcagccaagccgtgggacgttcatccttttactgcctggaatatttcccttctcagatgctgagaacgggcaacaactttaccttcagctacacctttgaggaagtgcctttccacagcagctacgcgcacagccagagcctggaccggctgatgaatcctctcatcgaccaatacctgtattacctgaacagaactcaaaatcagtccggaagtgcccaaaacaaggacttgctgtttagccgtgggtctccagctggcatgtctgttcagcccaaaaactggctacctggaccctgttatcggcagcagcgcgtttctaaaacaaaaacagacaacgacaacagcaattttacctggactggtgcttcaaaatataacctcaatgggcgtgaatccatcatcaaccctggcactgctatggcctcacacaaagacgacgaagacaagttctttcccatgagcggtgtcatgatttttggaaaagagagcgccggagcttcaaacactgcattggacaatgtcatgattacagacgaagaggaaattaaagccactaaccctgtggccaccgaaagatttgggaccgtggcagtcaatttccagagcagcagcacagaccctgcgaccggagatgtgcatgctatgggagcattacctggcatggtgtggcaagatagagacgtgtacctgcagggtcccatttgggccaaaattcctcacacagatggacactttcacccgtctcctcttatgggcggctttggactcaagaacccgcctcctcagatcctcatcaaaaacacgcctgttcctgcgaatcctccggcggagttttcagctacaaagtttgcttcattcatcacccaatactccacaggacaagtgagtgtggaaattgaatgggagctgcagaaagaaaacagcaagcgctggaatcccgaagtgcagtacacatccaattatgcaaaatctgccaacgttgattttactgtggacaacaatggactttatactgagcctcgccccattggcacccgttaccttacccgtcccctg

SEQ ID NO: 3045 - DNA, 2208 bp, Artificial Sequence
  Synthetic polynucleotide
atggctgccgatggttatcttccagattggctcgaggacaacctctctgagggcattcgcgagtggtgggacttgaaacctggagctccgaagcccaaagccaaccagcaaaagcaggacgacggccggggtctggtgcttcctggctacaagtacctcggacccttcaacggactcgacaagggggagcccgtcaacgcggcggacgcagcggccctcgagcacgacaaggcctacgaccagcagctcaaagcgggtgacaatccgtacctgcggtataaccacgccgacgccgagtttcaggagcgtctgcaagaagatacgtcttttgggggcaacctcgggcgagcagtcttccaggccaagaagcgggttctcgaacctctcggtctggttgaggaaggcgctaagacggctcctggaaagaaacgtccggtagagcagtcgccacaagagccagactcctcctcgggcatcggcaagacaggccagcagcccgctaaaaagagactcaattttggtcagactggcgactcagagtcagtccccgatccacaacctctcggagaacctccagcaacccccgctgctgtgggacctactacaatggcttcaggcggtggcgcaccaatggcagacaataacgaaggcgccgacggagtgggtaatgcctcaggaaattggcattgcgattccacatggctgggcgacagagtcatcaccaccagcacccgcacctgggccttgcccacctacaataaccacctctacaagcaaatctccagtgcttcaacgggggccagcaacgacaaccactacttcggctacagcaccccctgggggtattttgatttcaacagattccactgccacttttcaccacgtgactggcagcgactcatcaacaacaattggggattccggcccaagagactcaacttcaaactcttcaacatccaagtcaaggaggtcacgacgaatgatggcgtcacaaccatcgctaataaccttaccagcacggttcaagtcttctcggactcggagtaccagcttccgtacgtcctcggctctgcgcaccagggctgcctccctccgttcccggcggacgtgttcatgattccgcaatacggctacctgacgctcaacaatggcagccaagccgtgggacgttcatccttttactgcctggaatatttcccttctcagatgctgagaacgggcaacaactttaccttcagctacacctttgaggaagcgcctttccacagcagctacgcgcacagccagagcctggaccggctgatgaatcctctcatcgaccaatacctgtattacctgaacagaactcaaaatcagtccggaagtgcccaaaacaaggacttgctgtttagccgtgggtctccagctggcatgtctgttcagcccaaaaactggctacctggaccctgttatcggcagcagcgcgtttctaaaacaaaaacagacaacaacaacagcaattttacctggactggtgcttcaaaatataacctcaatgggcgtgaatccatcatcaaccctggcactgctatggcctcacacaaagacgacgaagacaagttctttcccatgagcggtgtcatgatttttggaaaagagagcgccggagcttcaaacactgcattggacaatgtcatgattacagacgaagaggaaattaaagccactaaccctgtggccaccgaaagatttgggaccgtggcagtcaatttccagagcagcagcacagaccctgcgaccggagatgtgcatgctatgggagcattacctggcatggtgtggcaagatagagacgtgtacctgcagggtcccatttgggccaaaattcctcacacagatggacactttcacccgtctcctcttatgggcggctttggactcaagaacccgcctcctcagatcctcatcaaaaacacgcctgttcctgcgaatcctccggcggagttttcagctacaaagtttgcttcattcatcacccaatactccacaggacaagtgagtgtggaaattgaatgggagctgcagaaagaaaacagcaagcgctggaatcccgaagtgcagtacacatccaattatgcgaaatctgccaacgttgattttactgtggacaacaatggactttatactgagcctcgccccgttggcacccgttaccttacccgtcccctg

SEQ ID NO: 3046 - DNA, 2208 bp, Artificial Sequence
  Synthetic polynucleotide
atggctgccgatggttatcttccagattggctcgaggacaacctctctgagggcattcgcgagtggtgggacttgaaacctggagccccgaagcccaaagccaaccagcaaaagcaggacgacggccggggtctggtgcttcctggctacaagtacctcggacccttcaacggactcgacaagggggagcccgtcaacgcggcggacgcagcggccctcgagcacgacaaggcctacgaccagcagctcaaagcgggtgacaatccatacctgcggtataaccacgccgacgccgagtttcaggagcgtctgcaagaaaatacgtcttttgggggcaacctcgggcgagcagtcttccaggccaagaagcgggttctcgaacctctcggtctggttgaggaaggcgctaagacggctcctggaaagaaacgtccggtagagcagtcgccacaagagccagactcctcctcgggcatcggcaagacaggccagcagcccgctaaaaagagactcaattttggtcagactggcgactcagagtcagtccccgatccacaacctctcggagaacctccagcaacccccgctgctgtgggacctactacaatggcttcaggcggtggcgcaccaatggcagacaataacgaaggcgccgacggagtgggtaatgcctcaggaaattggcattgcgattccacatggctgggcgacagagtcatcaccaccagcacccgcacctgggccttgcccacctacaataaccacctctacaagcaaatctccagtgcttcaacgggggccagcaacgacaaccactacttcggctacagcaccccctgggggtattttgatttcaacagattccactgccactttccaccacgtgactggcagcgactcatcaacaacaattggggattccggcccaagagactcaacttcaaactcttcaacatccaagtcaaggaggtcacgtcgaatgatggcgtcacaaccatcgctaataaccttaccagcacggttcaagtcttctcggactcggagtaccagcttccgtacgtcctcggctctgcgcaccagggctgcctccctccgttcccggcggacgtgttcatgattccgcaatacggctacctgacgctcaacaatggcagccaagccgtgggacgttcatccttttactgcctggaatatttcccttctcagatgctgagaacgggcaacaactttaccttcagctacacctttgaggaagtgcctttccacagcagctacgcgcacagccagagcctggaccggctgatgaatcctctcatcgaccaatacctgtattacctgaacagaactcaaaatcagtccggaagtgcccaaaacaaggacttgctgtttagccgtgggtctccagctggcatgtctgttcagcccaaaaactggctacctggtccctgttatcggcagcagcgcgtttctaaaacaaaaacagacaacaacaacagcaattttacctggactggtgcttcaaaatataacctcaatgggcgtgaatccatcatcaaccctggcactgctatggcctcacacaaagacgacgaagacaagttctttcccatgagcggtgtcatgatttttggaaaagagagcgccggagcttcaaacactgcattggacaatgtcatgattacagacgaagaggaaattaaagccactaaccctgtggccaccgaaagatttgggaccgtggcagtcaatttccagagcagcagcacagaccctgcgaccggagatgtgcatgctatgggagcattacctggcatggtgtggcaagatagagacgtgtacctgcagggtcccatttgggccaaaattcctcacacagatggacactttcacccgtctcctcttatgggcggctttggactcaagaacccgcctcctcagatcctcatcaaaaacacgcctgttcctgcgaatcctccggcggagttttcagctacaaagtttgcttcattcatcacccaatactccacaggacaagtgagtgtggaaattgaatgggagctgcagaaagaaaacagcaagcgctggaatcccgaagtgcagtacacatccaattatgcaaaatctgccaacgttgattttactgtggacaacaatggactttatactgagcctcgccccattggcacccgttaccttacccgtcccctg

SEQ ID NO: 3047 - DNA, 2208 bp, Artificial Sequence
  Synthetic polynucleotide
atggctgccgatggttatcttccagattggctcgaggacaacctctctgagggcattcgcgagtggtgggacttgaaacctggagccccgaagcccaaagccaaccagcaaaagcaggacgacggccggggtctggtgcttcctggctacaagtacctcggacccttcaacggactcgacaagggggagcccgtcaacgcggcggacgcagcggccctcgagcacgacaaggcctacgaccagcagctcaaagcgggtgacaatccgtacctgcggtataaccacgccgacgccgagtttcaggagcgtctgcaagaagatacgtcttttgggggcaacctcgggcgagcagtcttccaggccaagaagcgggttctcgaacctctcggtctggttgaggaaggcgctaagacggctcctggaaagaaacgtccggtagagcagtcgccacaagagccagactcctcctcgggcatcggcaagacaggccagcagcccgctaaaaagagactcaattttggtcagactggcgactcagagtcagtccccgatccacaacctctcggagaacctccagcaacccccgctgctgtgggacctactacaatggcttcaggcggtggcgcaccaatggcagacaataacgaaggcgccgacggagtgggtaatgcctcaggaaattggcattgcgattccacatggctgggcgacagagtcatcaccaccagcacccgcacctgggccttgcccacctacaataaccacctctacaagcaaatctccagtgcttcaacgggggccagcaacgacaaccactacttcggctacagcaccccctgggggtattttgatttcaacagattccactgccacttttcaccacgtgactggcagcgactcatcaacaacaattggggattccggcccaagagactcaacttcaaactcttcaacatccaagtcaaggaggtcacgacgaatgatggcgtcacaaccatcgctaataaccttaccagcacggttcaagtcttctcggactcggagtaccagcttccgtacgtcctcggctctgcgcaccagggctgcctccctccgttcccggcggacgtgttcatgattccgcaatacggctacctgacgctcaacaatggcagccaagccgtgggacgttcatccttttactgcctggaatatttcccttctcagatgctgagaacgggcaacaactttaccttcagctacacctttgaggaagtgcctttccacagcagctacgcgcacagccagagcctggaccggctgatgaatcctctcatcgaccaatacctgtattacctgaacagaactcaaaatcagtccggaagtgcccaaaacaaggacttgctgtttagccgtgggtctccagctggcacgtctgttcagcccaaaaactggctacctggaccctgttatcggcagcagcgcgtttctaaaacaaaaacagacaacaacaacagcaattttacctggactggtgcttcaaaatataacctcaatgggcgtgaatccatcatcaaccctggcactgctatggcctcacacaaagacgacgaagacaagttctttcccatgagcggtgtcatgatttttggaaaagagagcgccggagcttcaaacactgcattggacaatgtcatgattacagacgaagaggaaattaaagccactaaccctgtggccaccgaaagatttgggaccgtggcagtcaatttccagagcagcagcacagaccctgcgaccggagatgtgcatgctatgggagcattacctggcatggtgtggcaagatagagacgtgtacctgcagggtcccatttgggccaaaattcctcacacagatggacactttcacccgtctcctcttatgggcggctttggactcaagaacccgcctcctcagatcctcatcaaaaacacgcctgttcctgcgaatcctccggcggagttttcagctacaaagtttgcttcattcatcacccaatactccacaggacaagtgagtgtggaaattgaatgggagctgcagaaagaaaacagcaagcgctggaatcccgaagtgcagtacacatccaattatgcaaaatctgccaacgttgattttactgtggacaacaatggactttatactgggcctcgccccattggcacccgttaccttacccgtcccctg

SEQ ID NO: 3048 - DNA, 2208 bp, Artificial Sequence
  Synthetic polynucleotide
atggctgccgatggttatcttccagattggctcgaggacaacctctctgagggcattcgcgagtggtgggacttgaaacctggagccccgaagcccaaagccaaccagcaaaagcaggacgacggccggggtctggtgcttcctggctacaagtacctcggacccttcaacggactcgacaagggggagcccgtcaacgcggcggacgcagcggccctcgagcacgacaaggcctacgaccagcagctcaaagcgggtgacaatccgtacctgcggtataaccacgccgacgccgagtttcaggagcgtctgcaagaagatacgtcttttgggggcaacctcgggcgagcagtcttccaggccaagaagcgggttctcgaacctctcggtctggttgaggaaggcgctaagacggctcctggaaagaaacgtccggtagagcagtcgccacaagagccagactcctcctcgggcatcggcaagacaggccagcagcccgctaaaaagagactcaattttggtcagactggcgactcagagtcagtccccgatccacaacctctcggagaacctccagcaacccccgctgctgtgggacctactacaatggcttcaggcggtggcgcaccaatggcagacaataacgaaggcgccgacggagtgggtaatgccccaggaaattggcattgcgactccacatggctgggcgacagagtcatcaccaccagcacccgcacctgggccttgcccacctacaataaccacctctacaagcaaatctccagtgcttcaacgggggccagcaacgacaaccactacttcggctacagcaccccctgggggtattttgatttcaacagattccactgccacttttcaccacgtgactggcagcgactcatcaacaacaattggggattccggcccaagagactcaacttcaaactcttcaacatccaagtcaaggaggtcacgacgaatgatggcgtcacaaccatcgctaataaccttaccagcacggttcaagtcttctcggactcggagtaccagcttccgtacgtcctcggctctgcgcaccagggctgcctccctccgttcccggcggacgtgttcatgattccgcaatacggctacctgacgctcaacaatggcagccaagccgtgggacgttcatccttttactgcctggaatatttcccttctcagatgctgagaacgggcaacaactttaccttcagctacacctttgaggaagtgcctttccacagcagctacgcgcacagccagagcctggaccggctgatgaatcctctcatcgaccaatacctgtattacctgaacagaactcaaaatcagtccggaagtgcccaaaacaaggacttgctgtttagccgtgggtctccagctggcatgtctgttcagcccaaaaactggctacctggaccctgttatcggcagcagcgcgtttctaaaacaaaaacagacaacaacaacagcaattttacctggactggtgcttcaaaatataacctcaatgggcgtgaatccatcatcaaccctggcacagctatggcctcacacaaagacgacgaagacaagttctttcccatgagcggtgtcatgatttttggaaaagagagcgccggagcttcaaacactgcattggacaatgtcatgattacaggcgaagaggaaattaaagccactaaccctgtggccaccgaaagatttgggaccgtggcagtcaatttccagagcagcagcacagaccctgcgaccggagatgtgcatgctatgggagcattacctggcatggtgtggcaagatagagacgtgtacctgcagggtcccatttgggccaaaattcctcacacagatggacactttcacccgtctcctcttatgggcggctttggactcaagaacccgcctcctcagatcctcatcaaaaacacgcctgttcctgcgaatcctccggcggagttttcagctacaaagtttgcttcattcatcacccaatactccacaggacaagtgagtgtggaaattgaatgggagctgcagaaagaaaacagcaagcgctggaatcccgaagtgcagtacacatccaattatgcaaaatctgccaacgttgattttactgtggacaacaatggactttatactgagcctcgccccattggcacccgttaccttacccgtcccctg

SEQ ID NO: 3049 - DNA, 2208 bp, Artificial Sequence
  Synthetic polynucleotide
atggctgccgatggttatcttccagattggctcgaggacaacctctctgagggcattcgcgagtggtgggacttgaaacctggagccccgaagcccaaagccaaccagcaaaagcaggacgacggccggggtctggtgcttcctggctacaagtacctcggacccttcaacagactcgacaagggggagcccgtcaacgcggcggacgcagcggccctcgagcacgacaaggcctacgaccagcagctcaaagcgggtgacaatccgtacctgcggtataaccacgccgacgccgagtttcaggagcgtctgcaagaagatacgtcttttgggggcaacctcgggcgagcagtcttccaggccaagaagcgggttctcgaacctctcggtctggttgaggaaggcgctaagacggctcctggaaggaaacgtccggtagagcagtcgccacaagagccagactcctcctcgggcatcggcaagacaggccagcagcccgctaaaaagagactcaattttggtcagactggcgactcagagtcagtccccgatccacaacctctcggagaacctccagcaacccccgctgctgtgggacctactacaatggcttcaggcggtggcgcgccaatggcagacaataacgaaggcgccgacggagtgggtaatgcctcaggaaattggcattgcgattccacatggctgggcgacagagtcatcaccaccagcacccgcacctgggccttgcccacctacaataaccacctctacaagcaaatctccagtgcttcaacgggggccagcaacgacaaccactacttcggctacagcaccccctgggggtattttgatttcaacagattccactgccacttttcaccacgtgactggcagcgactcatcaacaacaattggggattccggcccaagagactcaacttcaaactcttcaacatccaagtcaaggaggtcacgacgaatgatggcgtcacaaccatcgctaataaccttaccagcacggttcaagtcttctcggactcggagtaccagcttccgtacgtcctcggctctgcgcaccagggctgcctccctccgttcccggcggacgtgttcatgattccgcaatacggctacctgacgctcaacaatggcggccaagccgtgggacgttcatccttttactgcctggaatatttcccttctcagatgctgagaacgggcaacaactttaccttcagctacacctttgaggaagtgcctttccacagcagctacgcgcacagccagagcctggaccggctgatgaatcctctcatcgaccaatacctgtattacctgaacagaactcaaaatcagtccggaagtgcccaaaacaaggacttgctgtttagccgtgggtctccagctggcatgtctgttcagcccaaaaactggctacctggaccctgttatcggcagcagcgcgtttctaaaacaaaaacagacaacaacaacagcaattttacctggactggtgcttcaaaatatagcctcaatgggcgtgaatccatcatcaaccctggcactgctatggcctcacacaaagacgacgaagacaagttctttcccatgggcggtgtcatgatttttggaaaagagagcgccggagcttcaaacactgcattggacaatgccatgattacagacgaagaggaaattaaagccactaaccctgtggccaccgaaagatttgggaccgtggcagtcaatttccagagcagcagcacagaccctgcgaccggagatgtgcatgctatgggagcattacctggcatggtgtggcaagatagagacgtgtacctgcagggtcccatttgggccaaaattcctcacacagatggacactttcacccgtctcctcttatgggcggctttggactcaagaacccgcctcctcagatcctcatcaaaaacacgcctgttcctgcgaatcctccggcggagttttcagctacaaagtttgcttcattcatcacccaatactccacaggacaagtgagtgtggaaattgaatgggagctgcagaaagaaaacagcaagcgctggaatcccgaagtgcagtacacatccaattatgcaaaatctgccaacgttgattttactgtggacaacaatggactttatactgagcctcgccccattggcacccgttaccttacccgtcccctg

SEQ ID NO: 3050 - DNA, 2208 bp, Artificial Sequence
  Synthetic polynucleotide
atggctgccgatggttatcttccagattggctcgaggacaacctctctgagggcattcgcgagtggtgggacttgaaacctggagccccgaagcccaaagccaaccagcaaaagcaggacgacggccggggtctggtgcttcctggctacaagtacctcggacccttcaacggactcgacaagggggagcccgtcaacgcggcggacgcagcggccctcgagcacgacaaggcctacgaccagcagctcaaagcgggtgacaatccgtacctgcggtataaccacgccgacgccgagtttcaggagcgtctgcaagaagatacgtcttttgggggcaacctcgggcgagcagtcttccaggccaagaagcgggttctcgaacctctcggtctggttgaggaaggcgctaagacggctcctggaaagaaacgtccggtagagcagtcgccacaagagccagactcctcctcgggcatcggcaagacaggccagcagcccgctaaaaagagactcaattttggtcagactggcgactcagagtcagtccccgatccacaacctctcggagaacctccagcaacccccgctgctgtgggacctactacaatggcttcaggcggtggcgcaccaatggcagacaataacgaaggcgccgacggagtgggtaatgcctcaggaaattggcattgcgattccacatggctgggcggcagagtcatcaccaccagcacccgcacctgggccttgcccacctacaataaccacctctacaagcaaatctccagtgcttcaacgggggccagcaacgacaaccactacttcggctacagcaccccctgggggtattttgatttcaacagattccactgccacttttcaccacgtgactggcagcgactcatcaacaacaattggggattccggcccaagagactcaacttcaaactcttcaacatccaagtcaaggaggtcacgacgaatgatggcgtcacaaccatcgctaataaccttaccagcacggttcaagtcttctcggactcggagtaccagcttccgtacgtcctcggctctgcgcaccagggctgcctccctccgttcccggcggacgtgttcatgattccgcaatacggctacctgacgctcaacaatggcagccaagccgtgggacgttcatccttttactgcctggaatatttcccttctcagatgctgagaacgggcaacaactctaccttcagctacacctttgaggaagtgcctttccacagcagctacgcgcacagccagagcctggaccggctgatgaatcctctcatcgaccaatacctgtattacctgaacagaactcaaaatcagtccggaagtgcccaaaacaaggacttgctgtttagccgtgggtctccagctggcatgtctgttcagcccaaaaactggctacctggaccctgttatcggcagcagcgcgtttctaaaacaaaaacagacaacaacaacagcaattttacctggactggtgcttcaaaatataacctcaatgggcgtgaatccatcatcaaccctggcactgctatggcctcacacaaagacgacgaagacaagttctttcccatgagcggtgtcatgatttttggaaaagagagcgccggagcttcaaacactgcattggacaatgtcatgattacagacgaagaggaaattaaagccactaaccctgtggccaccgaaagatttgggaccgtggcagtcaatttccagagcagcagcacagaccctgcgaccggagatgtgcatgctatgggaacattacctggcatggtgtggcaagatagagacgtgtacctgcagggtcccatttgggccaaaattcctcacacagatggacactttcacccgtctcctcttatgggcggctttggactcaagaacccgcctcctcagatcctcatcaaaaacacgcctgttcctgcgaatcctccggcggagttttcagctacaaagtttgcttcattcatcacccaatactccacaggacaagtgagtgtggaaattgaatgggagctgcagaaagaaaacagcaagcgctggaatcccgaagtgcagtacacatccaattatgcaaaatctgccaacgttgattttactgtggacaacaatggactttatactgagcctcgccccattggcacccgttaccttacccgtcccctg

SEQ ID NO: 3051 - DNA, 2208 bp, Artificial Sequence
  Synthetic polynucleotide
atggctgccgatggttatctcccagattggctcgaggacaacctctctgagggcattcgcgagtggtgggacttgaaacctggagccccgaagcccaaagccaaccagcaaaagcaggacgacggccggggtctggtgcttcctggctacaagtacctcggacccttcaacggactcgacaagggggagcccgtcagcgcggcggacgcagcggccctcgagcacgacaaggcctacgaccagcagctcaaagcgggtgacaatccgtacctgcggtataaccacgccgacgccgagtttcaggagcgtctgcaagaagatacgtcttttgggggcaacctcgggcgagcagtcttccaggccaagaagcgggttctcgaacctctcggtctggttgaggaaggcgctaagacggctcctggaaagaaacgtccggtagagcagtcgccacaagagccagactcctcctcgggcatcggcaagacaggccagcagcccgctaaagagagactcaattttggtcagactggcgactcagagtcagtccccgatccacaacctctcggagaacctccagcaacccccgctgctgtgggacctactacaatggcttcaggcggtggcgcaccaatggcagacaataacgaaggcgccgacggagtgggtaatgcctcaggaaattggcattgcgattccacatggctgggcgacagagtcatcaccaccagcacccgcacctgggccttgcccacctacaataaccacctctacaagcaaatctccagtgcttcaacgggggccagcaacgacaaccactacttcggctacagcaccccctgggggtattttgatttcaacagattccactgccacttttcaccacgtgactggcagcgactcatcaacaacaattggggattccggcccaagagactcaacttcaaactcttcaacatccaagtcaaggaggtcacgacgaatgatggcgtcacaaccatcgccaataaccttaccagcacggttcaagtcttctcggactcggagtaccagcttccgtacgtcctcggctctgcgcaccagggctgcctccctccgttcccggcggacgtgttcatgattccgcaatacggctacctgacgctcaacaatggcagccaagccgtgggacgttcatccttttactgcctggaatatttcccttctcagatgctgagaacgggcaacaactttaccttcagctacacctttgaggaagtgcctttccacagcagctacgcgcacagccagagcctggaccggctgatgaatcctctcatcgaccaatacctgtattacctgaacagaactcaaaatcagtccggaagtgcccaaaacaaggacttgctgtttagccgtgggtctccagctggcatgtctgttcagcccaaaaactggctacctggaccctgttatcggcagcagcgcgtttctaaaacaaaaacagacaacaacaacagcaattttacctggactggtgcttcaaaatataacctcaatgggcgtgaatccatcatcaaccctggcactgctatggcctcacacaaagacgacgaagacaagttctttcccatgagcggtgtcatgatttttggaaaagagagcgccggagcttcaaacactgcattggacaatgtcatgattacagacgaagaggaaattaaagccactaaccctgtggccaccgaaagatttgggaccgtggcagtcaatttccagagcagcagcacagaccctgcgaccggagatgtgcatgctatgggagcattacctggcatggtgtggcaagatagagacgtgtacctgcagggtcccatttgggccaaaattcctcacacagatggacactttcacccgtctcctcttatgggcggctttggactcaagaacccgcctcctcagatcctcatcaaaaacacgcctgttcctgcgaatcctccggcggagttttcagctacaaagtttgcttcattcatcacccaatactccacaggacaagtgagtgtggaaattgaatgggagctgcagaaagaaaacagcaagcgctggaatcccgaagtgcagtacacatccaattatgcaaaatctgccaacgttgattttactgtggacaacaatggactttatactgagcctcgccccattggcacccgttaccttacccgtcccctg

SEQ ID NO: 3052 - DNA, 2208 bp, Artificial Sequence
  Synthetic polynucleotide
atggctgccgatggttatcttccagattggctcgaggacaacctctctgagggcattcgcgagtggtgggacttgaaacctggagccccgaagcccaaagccaaccagcaaaagcaggacgacggccggggtctggtgcttcctggctacaagtacctcggacccttcaacggactcgacaagggggagcccgtcaacgcggcggacgcagcggccctcgagcacgacaaggcctacgaccagcagctcaaagcgggtgacaatccgtacctgcggtataaccacgccgacgccgagtttcaggagcgtctgcaagaagatacgtcttttgggggcaacctcgggcgagcagtcttccaggccaagaagcgggttctcgaacctctcggtctggttgaggaaggcgctaagacggctcctggaaagaaacgtccggtagagcagtcgccacaagagccagactcctcctcgggcatcggcaagacaggccagcagcccgctaaaaagagactcaattttggtcagactggcgactcagagtcagtccccgatccacaacctctcggagaacctccagcaacccccgctgctgtgggacctactacaatggcttcaggcggtggcgcaccaatggcagacaataacgaaggcgccgacggagtgggtaatgcctcaggaaattggcattgcgattccacatggctgggcgacagagtcatcaccaccagcacccgcacctgggccttgcccacctacaataaccacctctacaagcaaatctccagtgcttcaacgggggccagcaacgacaaccactacttcggctacagcaccccctgggggtattttgatttcaacagattccactgccacttttcaccacgtgactggcagcgactcatcaacaacaattggggattccggcccaagagactcaacttcaaactcttcaacatccaagtcaaggaggtcacgacgaatgatggcgtcacaaccatcgctaataaccttaccagcacggttcaagtcttctcggactcggagtaccagcttccgtacgtcctcggctctgcgcaccagggctgcctccctccgttcccggcggacgtgttcatgattccgcaatacggctacctgacgctcaacaatggcagccaagccgtgggacgttcatccttttactgcctggaatatttcccttctcagatgctgagaacgggcaacaactttaccttcagctacacctttgaggaagtgcctttccacagcagctacgcgcacagccagagcctggaccggctgatgaatcctctcatcgaccaatacctgtattacctgaacagaactcaaaatcagtccggaagtgcccaaaacaaggacttgctgtttagccgtgggtctccagctggcatgtctgttcagcccaaaaactggctacctggaccctgttatcggcagcagcgcgtttctaaaacaaaaacagacaacaacaacagcaattttacctggactggtgcttcaaaatataacctcaatgggcgtgaatccatcatcaaccctggcactgctatggcctcacacaaagacgacgaagacaagttctttcccatgagcggtgtcatgatttttggaaaagagagcgccggagcttcaaacactgcattggacaatgtcatgattacagacgaaggggaaattaaagccactaaccctgtggccaccgaaagatttgggaccgtggcagtcaatttccagagcagcagcacagaccctgcgaccggagatgtgcatgctatgggagcattacctggcatggtgtggcaagatagagacgtgtacctgcagggtcccatttgggccaaaattcctcacacagatggacactttcacccgtctcctcttatgggcggctttggactcaagaacccgcctcctcagatcctcatcaaaaacacgcctgttcctgcgaatcctccggcggagttttcagctacaaagtttgcttcattcatcacccaatactccacaggacaagtgagtgtggaaattgaatgggagctgcagaaagaaaacagcaagcgctggaatcccgaagtgcagtacacatccaattatgcaaaatctgccaacgttgattttactgtggacaacaatggactttatactgagcctcgccccattggcacccgttaccttacccgtcccctg

SEQ ID NO: 3053 - DNA, 2208 bp, Artificial Sequence
  Synthetic polynucleotide
atggctgccgatggttatcttccagattggctcgaggacaacctctctgagggcattcgcgagtggtgggacttgaaacctggagccccgaaacctaaagccaaccagcaaaagcaggacgacggccggggtctggtgcttcctggctacaagtacctcggacccttcaacggactcgacaagggggagcccgtcaacgcggcggacgcagcggccctcgagcacgacaaggcctacgaccagcagctcaaagcgggtgacaatccgtacctgcggtataaccacgccgacgccgagtttcaggagcgtctgcaagaagatacgtcttttgggggcaacctcgggcgagcagtcttccaggccaagaagcgggttctcgaaccttttggtctggttgaggaaggcgctaagacggctcctggaaagaaacgtccggtagagcagtcgccacaagagccagactcctcctcgggcatcggcaagacaggccagcagcccgctaaaaagagactcaattttggtcagactggcgactcagagtcagtccccgacccacaacctctcggagaacctccagcaacccccgctgctgtgggacctactacaatggcttcaggcggtggcgcaccaatggcagacaataacgaaggcgccgacggagtgggtaatgcctcaggaaattggcattgcgattccacatggctgggcgacagagtcatcaccaccagcacccgcacctgggccttgcccacctacaataaccacctctacaagcaaatctccagtgcttcaacgggggccagcaacgacaaccactacttcggctacagcaccccctgggggtattttgatttcaacagattccactgccacttttcaccacgtgactggcagcgactcatcaacaacaattggggattccggcccaagagactcaacttcaagctcttcaacatccaagtcaaggaggtcacgacgaacgatggcgtcacgaccatcgctaataaccttaccagcacggttcaagtcttctcggattcagagtaccaactgccgtacgtcctcggctctgcgcaccagggctgcctccctccgttcccggcggacgtgtttatgattccgcagtacggctacctaacgctcaacaatggcagccaggccgtgggacgttcatccttttactgcccggaatatttcccttctcagatgctgagaacgggcaacaactttaccttcagctacacctttgaggaagtgcctttccacagcagctacgcgcacagccagagcctggaccggctgatgaatcctctcatcgaccaatacctgtattacctgaacagaactcaaaatcagtccggaagtgcccaaaacaaggacttgctgtttagccgtgggtctccagctggcatgtctgttcagcccaaaaactggctacctggaccctgttatcggcagcagcgcgtttctaaaacaaaaacagacaacaacaacagcaattttacctggactggtgcttcaaaatataacctcaatgggcgtgaatccatcatcaaccctggcactgctatggcctcacacaaagacgacaaagacaagttctttcccatgagcggtgtcatgatttttggaaaagagagcgccggagcttcaaatactgcattggacaatgtcatgatcacagatgaagaggaaattaaagccactaaccctgtggccaccgaaagatttgggaccgtggcagtcaatttccagagcagcaacacagaccccgcgaccggagatgtgcatgttatgggagccttacctggcatggtgtggcaagacagagacgtatacctgcagggtcccatttgggccaaaattcctcacacggatggacactttcacccgtctcctctcatgggcggctttggacttaagcacccgcctcctcaaatcctcatcaaaaacacgcctgttcctgcgaatcctccggcagagttttcggctacaaagtttgcttcattcatcacccagtactccacaggacaagtgagtgtggaaattgaatgggagctgcagaaagaaaacagcaagcgctggaatcccgaagtgcagtacacatccaattatgcaaaatctgccaacgttgatttcactgtggacaacaatggactttatactgagcctcgccccattggcacccgttaccttacccgtcccttg

SEQ ID NO: 3054 - DNA, 2208 bp, Artificial Sequence
  Synthetic polynucleotide
atggctgccgatggttatcttccagattggctcgaggacaacctctctgagggcattcgcgagtggtgggacttgaaacctggagccccgaaacctaaagccaaccagcaaaagcaggacgacggccggggtctggtgcttcctggctacaagtacctcggacccttcaacggactcgacaagggggagcccgtcaacgcggcggacgcagcggccctcgagcacgacaaggcctacgaccagcagctcaaagcgggtgacaatccgtacctgcggtataaccacgccgacgccgagtttcaggagcgtctacaagaagatacgtcttttgggggcaacctcgggcgagcagtcttccaggccaagaagcgggttctcgaaccttttggtctggttgaggaaggcgctaagacggctcctggaaagaaacgtccggtagagcagtcgccacaagagccagactcctcctcgggcatcggcaagacaggccagcagcccgctaaaaagagactcaattttggtcagactggcgactcagagtcagtccccgacccacaacctctcggagaacctccagcaacccccgctgctgtgggacctactacaatggcttcaggcggtggcgcaccaatggcagacaataacgaaggcgccgacggagtgggtaatgcctcaggaaattggcattgcgattccacatggctgggcgacagagtcatcaccaccagcacccgcacctgggccttgcccacctacaataaccacctctacaagcaaatctccagtgcttcaacgggggccagcaacgacaaccactacttcggctacagcaccccctgggggtattttgatttcaacagattccactgccacttttcaccacgtgactggcagcgactcatcaacaacaattggggattccggcccaagagactcaacttcaagctcttcaacatccaagtcaaggaggtcacgacgaacgatggcgtcacgaccatcgctaataaccttaccagcacggttcaagtcttctcggattcagagtaccaactgccgtacgtcctcggctctgcgcaccagggctgcctccctccgttcccggcggacgtgttcatgattccgcagtacggctacctaacgctcaacaatggcagccaggccgtgggacgttcatccttttactgcctggaatatttcccttctcagatgctgagaacgggcaacaactttaccttcagctacacctttgaggaagtgcctttccacagcagctacgcgcacagccagagcctggaccggctgatgaatcctctcatcgaccaatacctgtattacctgaacagaactcaaaatcagtccggaagtgcccaaaacaaggacttgctgtttagccgtgggtctccagctggcatgtctgttcagcccaaaaactggctacctggaccctgttatcggcagcagcgcgtttctaaaacaaaaacagacaacaacaacagcaattttacctggactggtgcttcaaaatataacctcaatgggcgtgaatccatcatcaaccctggcactgctatggcctcacacaaagacgacaaagacaagttctttcccatgagcggtgtcatgatttttggaaaagagagcgccggagcttcaaatactgcattggacaatgtcatgatcacagatgaagaggaaattaaagccactaaccctgtggccaccgaaagatttgggaccgtggcagtcaatttccagagcagcgacacagaccccgcgaccggagatgtgcatgttatgggagccttacctggcatggtgtggcaagacagagacgtatacctgcagggtcccatttgggccaaaattcctcacacggatggacactttcacccgtctcctctcatgggcggctttggacttaagcacccgcctcctcaaatcctcatcaaaaacacgcctgttcctgcgaatcctccggcagagttttcggctacaaagtttgcttcattcatcacccagtactccacaggacaagtgagtgtggaaattgaatgggagctgcagaaagaaaacagcaagcgctggaatcccgaagtgcagtacacatccaattatgcaaaatctgccaacgttgatttcactgtggacaacaatggactttatactgagcctcgccccattggcacccgttaccttacccgtcccttg

SEQ ID NO: 3055 - DNA, 2208 bp, Artificial Sequence
  Synthetic polynucleotide
atggctgccgatggttatcttccagattggctcgaggacaacctctctgagggcattcgcgagtggtgggacttgaaacctggagccccgaaacctaaagccaaccagcaaaagcagggcgacggccggggtctggtgcttcctggctacaagtacctcggacccttcaacggactcgacaagggggagcccgtcaacgcggcggacgcagcggccctcgagcacgacaaggcctacgaccagcagctcaaagcgggtgacaatccgtacctgcggtataaccacgccgacgccgagtttcaggagcgtctgcaagaagatacgtcttttgggggcaacctcgggcgagcagtcttccaggccaagaagcgggttctcgaaccttttggtctggttgaggaaggcgctaagacggctcctggaaagaaacgtccggtagagcagtcgccacaagagccagactcctcctcgggcatcggcaagacaggccagcagcccgctaaaaagagactcaattttggtcagactggcgactcagagtcagtccccgacccacaacctctcggagaacctccagcaacccccgctgctgtgggacctactacaatggcttcaggcggtggcgcaccaatggcagacaataacgaaggcgccgacggagtgggtaatgcctcaggaaattggcattgcgattccacatggctgggcgacagagtcatcaccaccaacactcgcacctgggccttgcccacctacaataaccacctctacaagcaaatctccagtgcttcaacgggggccagcaacgacaaccactacttcggctacagcaccccctgggggtattttgatttcaacagattccactgccacttttcaccacgtgactggcagcgactcatcaacaacaattggggattccggcccaagagactcaacttcaagctcttcaacatccaagtcaaggaggtcacgacgaacgatggcgtcacgaccatcgctaataaccttaccagcacggttcaagtcttctcggattcagagtaccaactgccgtacgtcctcggctctgcgcaccagggctgcctccctccgttcccggcggacgtgttcatgattccgcagtacggctacctaacgctcaacaatggcagccaggccgtgggacgttcatccttttactgcctggaatatttcccttctcagatgctgagaacgggcaacaactttaccttcagctacacctttgaggaagtgcctttccacagcagttacgggcacagccagagcctggaccggctgatgaatcttctcatcgaccaatacctgtattacctgaacagaactcaaaatcagtccggaagtgcccaaaacaaggacttgctgtttagccgtgggtctccagctggcatgtttgttcagcccaaaaactggctacctggaccctgttatcggcagcagcgcgtttctaaaacaaaaacagacaacaacaacagcaattttacctggactggtgcttcaaaatataacctcaatgggcgtgaatccatcatcaaccctggcactgctatggcctcacacaaagacgacgaagacaagttctttcccatgagcggtgtcatgatttttggaaaagagagcgccggagcttcaaatactgcattggacaatgtcatgatcacagatgaagaggaaattaaagccactaaccctgtggccaccgaaagatttgggaccgtggcagtcaatttccagagcagcagcacagaccccgcgaccggagatgtgcatgttatgggagccttacctggcatggtgtggcaagacagagacgtatacctgcagggtcccatttgggccaaaattcctcacacggatggacactttcacccgtctcctctcatgggcggctttggacttaagcacccgcctcctcaaatcctcatcaaaaacacgcctgttcctgcgaatcctccggcagagttttcggctacaaagtttgcttcattcatcacccagtactccacaggacaagtgagtgtggaaattgaatgggagctgcagaaagaaaacagcaagcgctggaatcccgaagtgcagtacacatccaattatgcaaaatctgccaacgttgatttcactgtggacaacaatggactttatactgagcctcgccccattggcacccgttaccttacccgtcccttg

SEQ ID NO: 3056 - DNA, 2208 bp, Artificial Sequence
  Synthetic polynucleotide
atggctgccgatggttatcttccagattggctcgaggacaacctctctgagggcattcgcgagtggtgggacttgaaacctggagccccgaaacctaaagccaaccagcaaaagcaggacgacggccggggtctggtgcttcctggctacaagtacctcggacccttcaacggactcgacaagggggagcccgtcaacgcggcggacgcagcggccctcgagcacgacaaggcctacgaccagcagctcaaagcgggtgacaatccgtacctgcggtataaccacgccgacgccgagtttcaggagcgtctgcaagaagatacgtcttttgggggcaacctcgggcgagcagtcttccaggccaagaagcgggttctcgaaccttttggtctggttgaggaaggcgctaagacggctcctggaaagaaacgtccggtagagcagtcgccacaagagccagactcctcctcgggcatcggcaagacaggccagcagcccgctaaaaagagactcaattttggtcagactggcgactcagagtcagtccccgacccacaacctctcggagaacctccagcaacccccgctgctgtgggacctactacaatggcttcaggcggtggcgcaccaatggcagacaataacgaaggcgccgacggagtgggtaatgcctcaggaaattggcattgcgattccacatggctgggcgacagagtcatcaccaccaacacccgcacctgggccttgcccacctacaataaccacctctacaagcaaatctccagtgcttcaacgggggccagcaacgacaaccactacttcggctacagcaccccctgggggtattttgatttcaacagattccactgccacttttcaccacgtgactggcagcgactcatcaacaacaattggggattccggcccaagagactcaacttcaagctcttcaacatccaagtcaaggaggtcacgacgaacgatggcgtcacgaccatcgctaataaccttaccagcacggttcaagtcttctcggattcagagtaccaactgccgtacgtcctcggctctgcgcaccagggctgcctccctccgttcccggcggacgtgttcatgattccgcagtacggctacctaatgctcaacaatggcagccaggccgtgggacgttcatccttttactgcctggaatatttcccttctcagatgctgagaacgggcaacaactttaccttcagctacacctttgaggaagtgcctttccacagcagctacgcgcacagccagagcctggaccggctgatgaatcctctcatcgaccaatacctgtattacctgaacagaactcaaaatcagtccggaagtgcccaaaacaaggacttgctgtttagccgtgggtctccagctggcatgtctgttcagcccaaaaactggctacctggaccctgttatcggcagcagcgcgtttctaaaacaaaaacagacaacaacaacagcaattttacctggactggtgcttcaaaatataacctcaatgggcgtgaatccatcatcaaccctggcactgctatggcctcacacaaagacgacgaagacaagttctttcccatgagcggtgtcatgatttttggaaaagagagcgccggagcttcaaatactgcattggacaatgtcatgatcacagatgaagaggaaattaaagccactaaccctgcggccaccgaaagatttgggaccgtggcagtcaatttccagagcagcagcacagaccccgcgaccggagatgtgcatgttatgggagccttacctggcatggtgtggcaagacagagacgtatacctgcagggtcccatttgggccaaaattcctcacacggatggacactttcacccgtctcctctcatgggcggctttggacttaagcacccgcctcctcaaatcctcatcaaaaacacgcctgttcctgcgaatcctccggcagagttttcggctacaaagtttgcttcattcatcacccagtactccacaggacaagtgagtgtggaaattgaatgggagctgcagaaagaaaacagcaagcgctggaatcccgaagtgcagtacacatccaattatgcaaaatctgccaacgttgatttcactgtggacaacaatggactttatactgagcctcgccccattggcacccgttaccttacccgtcccttg

SEQ ID NO: 3057 - DNA, 2208 bp, Artificial Sequence
  Synthetic polynucleotide
atggctgccgatggttatcttccagattggctcgaggacaacctctctgagggcattcgcgagtggtgggacttgaaacctggagccccgaaacctaaagccaaccagcaaaagcaggacgacggccggggtctggtgcttcctggctacaagtacctcggacccttcaacggactcgacaagggggagcccgtcaacgcggcggacgcagcggccctcgagcacgacaaggcctacgaccagcagctcaaagcgggtgacaatccgtacctgcggtataaccacgccgacgccgagtttcaggagcgtctgcaagaagatacgtcttttgggggcaacctcgggcgagcagtcttccaggccaagaagcgggttctcgaaccttttggtctggttgaggaaggcgctaagacggctcctggaaagaaacgtccggtagagcagtcgccacaagagccagactcctcctcgggcatcggcaagacgggccagcagcccgctaaaaagagactcaattttggtcagactggcgactcagagtcagtccccgacccacaacctctcggagaacctccagcaacccccgctgctgtgggacctactacaatggcttcaggcggtggcgcaccaatggcagacaataacgaaggcgccgacggagtgggtaatgcctcaggaaattggcattgcgattccacatggctgggcgacagagtcatcaccaccagcacccgcacctgggccttgcccacctacaataaccacctctacaagcaaatctccagtgcttcaacgggggccagcaacgacaaccactacttcggctacagcaccccctgggggtattttgatttcaacagattccactgccacttttcaccacgtgactggcagcgactcatcaacaacaattggggattccggcccaagagactcaacttcaagctcttcaacatccaagtcaaggaggtcacgacgaacgatggcgtcacgaccatcgctaataaccttaccagcacggttcaagtcttctcggattcagagtaccaactgccgtacgtcctcggctctgcgcaccagggctgcctccctccgttcccggcggacgtgttcatgattccgcagtacggctacctaacgctcaacaatggcagccaggccgtgggacgttcatccttttactgcctggaatatttcccttctcagatgctgagaacgggcaacaactttaccttcagctacacctttgaggaagtgcctttccacagcagctacgcgcacagccagagcctggaccggctgatgaatcctctcatcgaccaatacctgtattacctgaacagaactcaaaatcagtccggaagtgcccaaaacaaggacttgctgtttagccgtgggtctccagctggcatgtccgttcagcccaaaaactggctacctggaccctgttatcggcagcagcgcgtttctaaaacaaaaacagacaacaacaacagcaattttacctggactggtgcttcaaaatataacctcaatgggcgtgaatccatcatcaaccctggcactgctatggcctcacacaaagacgacgaagacaagttctttcccatgagcggtgtcatgatttttggaaaagagagcgccggagcttcaaatactgcattggacaatgtcatgatcacagatgaagaggaaattaaagccactaaccctgtggccaccgaaagatttgggaccgtggcagtcaatttccagagcagcagcacagaccccgcgaccggagatgtgcatgttatgggagccttacctggcatggtgtggcaagacagagacgtatacctgcagggtcccatttgggccaaaattcctcacacggatggacactttcacccgtctcctctcatgggcggctttggacttaagcacccgcctcctcaaatcctcatcaaaaacacgcctgttcctgcgaatcctccggcagagttttcggctacaaagtttgcttcattcatcacccagtactccacaggacaagtgagtgtggaaattgaatgggagctgcagaaagaaaacagcaagcgctggaatcccgaagtgcagtacacatccaattatgcaaaatctgccaacgttgatttcactgtggacaacaatggactttatactgagcctcgccccattggcacccgttaccttacccgtcccttg

SEQ ID NO: 3058 - DNA, 2208 bp, Artificial Sequence
  Synthetic polynucleotide
  modified_base (305)..(305): a, c, g, or t
  misc_feature (305)..(305): n is a, c, g, or t
atggctgccgatggttatcttccagattggctcgaggacaacctctctgagggcattcgcgagtggtgggacttgaaacctggagccccgaaacctaaagccaaccagcaaaagcaggacgacggccggggtctggtgcttcctggctacaagtacctcggacccttcaacggactcgacaagggggagcccgtcaacgcggcggacgcagcggccctcgagcacgacaaggcctacgaccagcagctcaaagcgggtgacaatccgtacctgcggtataaccacgccgacgccgagtttcaggngcgtctgcaagaagatacgtcttttgggggcaacctcgggcgagcagtcttccaggccaagaagcgggttctcgaaccttttggtctggttgaggaaggcgctaagacggctcctggaaagaaacgtccggtagagcagtcgccacaagagccagactcctcctcgggcatcggcaagacaggccagcagcccgctaaaaagagactcaattttggtcagactggcgactcagagtcagtccccgacccacaacctctcggagaacctccagcaacccccgctgctgtgggacctactacaatggcttcaggcggtggcgcaccaatggcagacaataacgaaggcgccgacggagtgggtaatgcctcaggaaattggcattgcgattccacatggctgggcggcagagtcatcaccaccagcacccgcacctgggccttgcccacctacaataaccacctctacaagcaaatctccagtgcttcaacgggggccagcaacgacaaccactacttcggccacagcaccccctgggggtattttgatttcaacagattccactgccacttttcaccacgtgactggcagcgactcatcaacaacaattggggattccggcccaagagactcaacttcaagctcttcaacatccaagtcaaggaggtcacgacgaacgatggcgtcacgaccatcgctaataaccttaccagcacggttcaagtcttctcggattcagagtaccaactgccgtacgtcctcggctctgcgcaccagggctgcctccctccgtccccggcggacgtgttcatgattccgcagtacggctacctaacactcaacaatggcagccaggccgtgggacgttcatccttttactgcctggaatatttcccttctcagatgctgagaacgggcaacaactttaccttcagctacacctttgaggaagtgcctttccacagcagctacgcgcacagccagagcctggaccggctgatgaatcctctcatcgaccaatacctgtattacctgaacagaactcaaaatcagtccggaagtgcccaaaacaaggacttgctgtttagccgtgggtctccagctggcatgtctgttcagcccaaaaactggctacctggaccctgttatcggcagcagcgcgtttctaaaacaaaaacagacaacaacaacagcaattttacctggactggtgcttcaaaatataacctcaatgggcgtgaatccatcatcaaccctggcactgctatggcctcacacaaagacgacaaagacaagttctttcccatgagcggtgtcatgatttttggaaaagagagcgccggagcttcaaatactgcattggacaatgtcatgatcacagatgaagaggaaattaaagccactaaccctgtggccaccgaaagatttgggaccgtggcagtcaatttccagagcagcaacacagaccccgcgaccggagatgtgcatgttatgggagccttacctggcatggtgtggcaagacagagacgtatacctgcagggtcccatttgggccaaaattcctcacacggatggacactttcacccgtctcctctcatgggcggctttggacttaagcacccgcctcctcaaatcctcatcaaaaacacgcctgttcctgcgaatcctccggcagagttttcggctacaaagtttgcttcattcatcacccagtactccacaggacaagtgagtgtggaaattgaatgggagctgcagaaagaaaacagcaagcgctggaatcccgaagtgcagtacacatccaattatgcaaaatctgccaacgttgatttcactgtggacaacaatggactttatactgagcctcgccccattggcacccgttaccttacccgtcccttg

SEQ ID NO: 3059 - DNA, 2208 bp, Artificial Sequence
  Synthetic polynucleotide
atggctgccgatggttattttccagattggctcgaggacaacctttctgagggcattcgcgagtggtgggacttgaaacctggagccccgaaacctaaagccaaccagcaaaagcaggacgacggccggggtctggtgcttcctggctacaagtacctcggacccttcaacggactcgacaagggggagcccgtcaacgcggcggacgcagcggccctcgagcacgacaaggcctacgaccagcagctcaaagcgggtgacaatccgtacctgcggtataaccacgccgacgccgagtttcaggagcgtctgcaagaagatacgtcttttgggggcaacctcgggcgagcagtcttccaggccaagaagcgggttctcgaaccttttggtctggttgaggaaggcgctaagacggctcctggaaagaaacgtccggtagagcagtcgccacaagagccagactcctcctcgggcatcggcaggacaggccagcagcccgctaaaaagagactcaattttggtcagactggcgactcagagtcagtccccgacccacaacctctcggagaacctccagcgacccccgctgctgtgggacctactacaatggcttcaggcggtggcgcaccaatggcagacaataacgaaggtgccgacggagtgggtaatgcctcaggaaattggcattgcgattccacatggctgggcgacagagtcatcaccaccagcacccgcacctgggccttgcccacctacaataaccacctctacaagcaaatctccagtgcttcaacgggggccagcaacgacaaccactacttcggctacagcaccccctgggggtattttgatttcaacagattccactgccacttttcaccacgtgactggcagcgactcatcaacaacaattggggattccggcccaagagactcaacttcaagctcttcaacatccaagtcaaggaggtcacgacgaacgatggcgtcacgaccatcgctaataaccttaccagcacggttcaagtcttctcggattcagagtaccaactgccgtacgtcctcggctctgcgcaccagggctgcctccctccgttcccggcggacgtgttcatgattccgcagtacggctacctaacgctcaacaatggcagccaggccgtgggacgttcatccttttactgcctggaatatttcccttctcagatgctgagaacgggcaacaactttaccttcagctacacctttgaggaagtgcctttccacagcagctacgcgcacagccagagcctggaccggctgatgaatcctctcatcgaccaatacctgtattacctgaacagaactcaaaatcagtccggaagtgcccaaaacaaggacttgctgtttagccgtgggtctccagctggcatgtctgttcagcccaaaaactggctacctggaccctgttatcggcagcagcgcgtttctaaaacaaaaacagacaacaacaacagcaattttacctggactggtgcttcaaaatataacctcaatgggcgtgaatccatcatcaaccctggcactgctatggcctcacacaaagacgacgaagacaagttctttcccatgagcggtgtcatgatttttggaaaagagagcgccggagcttcaaatactgcattggacaatgtcatgatcacagatgaagaggaaattaaagccactaaccctgtggccaccgaaagatttgggaccgtggcagtcaatttccagagcagcagcccagaccccgcgaccggagatgtgcatgttatgggagccttacctggcatggtgtggcaagacagagacgtatacctgcagggtcccatttgggccaaaattcctcacacggatggacactttcacccgtctcctctcatgggcggctttggacttaagcacccgcctcctcaaatcctcatcaaaaacacgcctgttcctgcgaatcctccggcagagttttcggctacaaagtttgcttcattcatcacccagtactccacaggacaagtgagtgtggaaattgaatgggagctgcagaaagaaaacagcaagcgctggaatcccgaagtgcagtacacatccaattatgcaaaatctgccaacgttgatttcactgtggacaacaatggactttatagtgagcctcgccccattggcacccgttaccttacccgtcccttg

SEQ ID NO: 3060 - DNA, 2208 bp, Artificial Sequence
  Synthetic polynucleotide
atggctgccgatggttatcttccagattggctcgaggacaacctctctgagggcattcgcgagtggtgggacttgaaacctggagccccgaaacctaaagccaaccagcaaaagcaggacgacggccggggtctggtgcttcctggctacaagtacctcggacccttcaacggactcgacaagggggagcccgtcaacgcggcggacgcagcggccctcgagcacgacaaggcctacgaccagcagctcaaagcgggtgacaatccgtacctgcggtataaccacgccgacgccgagtttcaggagcgtctgcaagaagatacgtcttttgggggcaacctcgggcgagcagtcttccaggccaagaagcgggttctcgaaccttttggtctggttgaggaaggcgctaagacggctcctggaaagaaacgtccggtagagcagtcgccacaagagccagactcctcctcgggcatcggcaagacaggccagcagcccgctaaaaagagactcaattttggtcagactggcgactcagagtcagtccccgacccacaacctctcggagaacctccagcaacccccgctgctgtgggacctactacaatggcttcaggcggtggcgcaccaatggcagacaataacgaaggcgccgacggagtgggtaatgcctcaggaaattggcattgcgattccacatggctgggcgacagagtcatcaccaccagcacccgcacctgggccttgcccacctacaataaccacctctacaagcaaacctccagtgcttcaacgggggccagcaacgacaaccactacttcggctacagcaccccctgggggtattttgatttcaacagattccactgccacttttcaccacgtgactggcagcgactcatcaacaacaattggggattccggcccaagagactcaacttcaagctcttcaacatccaagtcaaggaggtcacgacgaacgatggcgtcacgaccatcgctaataaccttaccagcacggttcaagtcttctcggattcagagtaccaactgccgtacgtcctcggctctgcgcaccagggctgcctccctccgttcccggcggacgtgttcatgattccgcagtacggctacctaacgctcaacaatggcagccaggccgtgggacgttcatccttttactgcctggaatatttcccttctcagatgctgagaacgggcaacaactttaccttcagctacacctttgaggaagtgcctttccacagcagctacgcgcacagccagagcctggaccggctgatgaatcctctcatcgaccaatacctgtattacctgaacagaactcaaaatcagtccggaagtgcccaaaacaaggacttgctgtttagccgtgggtctccagctggcatgtctgttcagcccaaaaactggctacctggaccctgttatcggcagcagcgcgtttctaaaacaaaaacagactacaacaacagcaattttacctggactggtgcttcaaaatataacctcaatgggcgtgaatccatcatcaaccctggcactgctatggcctcacacaaagacgacgaagacaagttctttcccatgagcggtgtcatgatttttggaaaagagagcgccggagcttcaaatactgcattggacaatgtcatgatcacagatgaagaggaaattaaagccactaaccctgtggccaccgaaagatttgggaccgtggcagtcaatttccagagcagcagcacagaccccgcgaccggagatgtgcatgttatgggagccttacctggcatggtgtggcaagacagagacgtatacctgcagggtcccatttgggccaaaattcctcacacggatggacactttcacccgtctcctctcatgggcggctttggacttaagcacccgcctcctcaaatcctcatcaaaaacacgcctgttcctgcgaatcctccggcagagttttcggctacaaagtttgcttcattcatcacccagtactccacaggacaagtgagtgtggaaattgaatgggagctgcagaaagaaaacagcaagcgctggaatcccgaagtgcagtacacatccaattatgcaaaatctgccaacgttgatttcactgtggacaacaatggactttatactgagcctcgccccattggcacccgttaccttacccgtcccttg

SEQ ID NO: 3061 - DNA, 2208 bp, Artificial Sequence
  Synthetic polynucleotide
atggctgccgatggttatcctccagattggctcgaggacaacctctctgagggcattcgcgagtggtgggacttgaaacctggagtcccgaaacctaaagccaaccagcaaaagcaggacgacggccggggtctggtgcttcctggctacaagtacctcggacccttcaacggactcgacaagggggagcccgtcaacgcggcggacgcagcggccctcgagcacgacaaggcctacgaccagcagctcaaagcgggtgacaatccgtacctgcggtataaccacgccgacgccgagtttcaggagcgtctgcaagaagatacgtcttttgggggcaacctcgggcgagcagtcttccaggccaagaagcgggttctcgaaccttttggtctggttgaggaaggcgctaagacggctcctggaaagaaacgtccggtagagcagtcgccacaagagccagactcctcctcgggcatcggcaagacaggccagcagcccgctaaaaagagactcaattttggtcagactggcgactcagagtcagtccccgacccacaacctctcggagaacctccagcaacccccgctgctgtgggacctactacaatggcttcaggcggtggcgcaccaatggcagacaataacgaaggcgccgacggagtgggtaatgcctcaggaaattggcattgcgattccacatggctgggcgacagagtcatcaccaccagcacccgcacctgggccttgcccacctacaataaccacctctacaagcaaatctccagtgcttcaacgggggccagcaacgacaaccactacttcggctacagcaccccctgggggtattttgatttcaacagattccactgccacttttcaccacgtgactggcagcgactcatcaacaacaattggggattccggcccaagagactcaacttcaagctcttcaacatccaagtcaaggaggtcacgacgaacgatggcgtcacgaccatcgctaataaccttaccagcacggttcaagtcttctcggattcagagtaccaactgccgtacgtcctcggctctgcgcaccagggctgcctccctccgttcccggcggacgtgttcatgattccgcagtacggctacctaacgctcaacaatggcagccaggccgtgggacgttcatccttttactgcctggaatatttcccttctcagatgctgagaacgggcaacaactttaccttcagctacacctttgaggaagtgcctttccacagcagctacgcgcacagccagagcctggaccggctgatgaatcctctcatcgaccaatacctgtattacctgaacagaactcaaaatcagtccggaagtgcccaaaacaaggacttgctgtttagccgtgggtctccagctggcatgtctgttcagcccaaaaactggctacctggaccctgttatcggcagcagcgcgtttctaaaacaaaaacagacaacaacaacagcaattttacctggactggtgcttcaaaatataacctcaatgggcgtgaatccatcatcaaccctggcactgctatggcctcacacaaagacgacgaagacaagttctttcccatgagcggtgtcatgatttttggaaaagagagcgccggagcttcaaatactgcattggacaatgtcatgatcacagatgaagaggaaattaaagccactaaccctgtggccaccgaaagatttgggaccgtggcagtcaatttccagagcagcagcacagaccccgcgaccggagatgtgcatgttatgggagccttacctggcatggtgtggcaagacagagacgtatacctgcagggtcccatttgggccaaaattcctcacacggatggacactttcacccgtctcctctcatgggcggctttggacttaagcacccgcctcctcaaatcctcatcaaaaacacgcctgttcctgcgaatcctccggcagagttttcggctacaaagtttgcttcattcatcacccagtactccacaggacaagtgagtgtggaaattgaatgggagctgcagaaagaaaacagcaagcgctggaatcccgaagtgcagtacacatccaattatgcaaaatctgccaacgttgatttcactgtggacaacaatggactttatactgagcctcgccccattggcacccgttaccttacccgtcccttg

SEQ ID NO: 3062 - DNA, 2196 bp, Artificial Sequence
  Synthetic polynucleotide
atggctgccgatggttatcttccagattggctcgaggacaacctctctgagggcattcgcgagtggtgggacttgaaacctggagccccgaaacctaaagccaaccagcaaaagcaggacgacggccggggtctggtgcttcctggctacaagtacctcggacccttcaacggactcgacaagggggagcccgtcaacgcggcggacgcagcggccctcgagcacgacaaggcctacgaccagcagctcaaagcgggtgacaatccgtacctgcggtataaccacgccgacgccgagtttcaggagcgtctgcaagaagatacgtcttttgggggcaacctcgggcgagcagtcttccaggccaagaagcgggttctcgaaccttttggtctggttgaggaaggcgctaagacggctcctggaaagaaacgtccggtagagcagtcgccacaagagccagactcctcctcgggcatcggcaagacaggccagcagcccgctaaaaagagactcaattttggtcagactggcgactcagagtcagtccccgacccacaacctctcggagaacctccagcaacccccgctgctgtgggacctactacaatggcttcaggcggtggcgcaccaatggcagacaataacgaaggcgccgacggagtgggtaatgcctcaggaaattggcattgcgattccacatggctgggcgacagagtcatcaccaccagcacccgcacctgggccttgcccacctacaataaccacctctacaagcaaatctccagtgcttcaacgggggccagcaacgacaaccactacttcggctacagcaccccctgggggtattttgatttcaacagattccactgccacttttcaccacgtgactggcagcgactcatcaacaacaattggggattccggcccaagagactcaacttcaagctcttcaacatccaagtcaaggaggtcacgacgaacgatggcgtcacgaccatcgctaataaccttaccagcacggttcaagccttctcggattcagagtaccaactgccgtacgtcctcggctctgcgcaccagggctgcctccctccgttcccggcggacgtgttcatgattccgcagtacggctacctaacgctcaacaatggcagccaggccgtgggacgttcatccttttactgcctggaatatttcccttctcagatgctgagaacgggcaacaactttaccttcagctacacctttgaggaagtgcctttccacagcagctacgcgcacagccagagcctggaccggctgatgaatcctctcatcgacccatacctgtattacctgaacagaactcaaaatcagtccggaagtgcccaaaacaaggacttgctgtttagccgtgggtctccagctggcatgtctgttcagcccaaaaactggctacctggaccctgttatcggcagcagcgcgtttctaaaacaaaaacagacaacaacaacagcaattttacctggactggtgcttcaaaatataacctcaatgggcgtgaatccatcatcaaccctggcactgctatggcctcacacaaagacgacgaagacaagttctttcccatgagcggtgtcatgatttttggaaaagagagcgccggagcttcaaatactgcattggacaatgtcatgatcacagatgaagaggaaattaaagccactaaccctgtggccaccgaaagatttgggaccgtggcagtcaatttccagagcagcagcacagaccccgcgaccggagatgtgcatgttatgggagccttacctggcatggtgtggcaagacagagacgtatacctgcagggtcccatttgggccaaaattcctcacacggatggacactttcacccgtctcctctcatgggcggctttggacttaagcacccgcctcctcaaatcctcatcaaaaacacgcctgttcctgcgaatcctccggcagagttttcggctacaaagtttgcttcattcatcacccagtactccacaggacaagtgagtgtggaaattgaatgggagctgcagaaagaaaacagcaagcgctggaatcccgaagtgcagtacacatccaattatgcaaaatctgccaacgttgatttcactgtggacaacaatggactttatactgagcctcgccccattggcacccgttacctt

SEQ ID NO: 3063 - DNA, 2208 bp, Artificial Sequence
  Synthetic polynucleotide
atggctgccgatggttatcttccagattggctcgaggacaacctctctgagggcattcgcgagtggtgggacttgaaacctggagccccgaaacctaaagccaaccagcaaaagcaggacgacggccggggtctggtgcttcctggctacaagtacctcggacccttcaacggactcgacaagggggagcccgtcaacgcggcggacgcagcggccctcgagcacgacaaggcctacgaccagcagctcaaagcgggtgacaatccgtacctgcggtataaccacgccgacgccgagtttcaggagcgtctgcaagaagatacgtcttttgggggcaacctcgggcgagcagtcttccaggccaagaagcgggttctcgaaccttttggtctggttgaggaaggcgctaagacggctcctggaaagaaacgtccggtagagcagtcgccacaagagccagactcctcctcgggcatcggcaagacaggccagcagcccgctaaaaagagactcaattttggtcagactggcgactcagagtcagtccccgacccacaacctctcggagaacctccagcaacccccgctgctgtgggacctactacaatggcttcaggcggtggcgcaccaatggcagacaataacgaaggcgccgacggagtgggtaatgcctcaggaaattggcattgcgattccacatggctgggcgacagagtcatcaccaccagcacccgcacctgggccttgcccacctacaataaccacctctacaagcaaatctccagtgcttcaacgggggccagcaacgacaaccactacttcggctacagcaccccctgggggtattttgatttcaacagattccactgccacttttcaccacgtgactggcagcgactcatcaacaacaattggggattccggcccaagagactcaacttcaagctcttcaacatccaagtcaaggaggtcacgacgaacgatggcgtcacgaccatcgctaataaccttaccagcacggttcaagtcttctcggattcagagtaccaactgccgtacgtcctcggctctgcgcaccagggctgcctccctccgttcccggcggacgtgttcatgattccgcagtacggctacctaacgctcaacaatggcagccaggccgtgggacgttcatccttttactgcctggaatatttcccttctcagatgctgagaacgggcaacaactttaccttcagctacacctttgaggaagtgcctttccacagcagctacgcgcacagccagagcctggaccggctgatgaatcctctcatcgaccaatacctgtattacctgaacagaactcaaaatcagtccggaagtgcccaaaacaaggacttgctgtttagccgtgggtctccagctggcatgtctgttcagcccaaaaactggctacctggaccctgttatcggcagcagcgcgtttctaaaacaaaaacagacaacaacaacagcaattttacctggactggtgcttcaaaatataacctcaatgggcgtgaatccatcatcaaccctggcactgctatggcctcacacaaagacgacgaagacaagttctttcccatgagcggtgtcatgatttttggaaaagagagcgccggagcttcaaatactgcattggacaatgtcatgatcacagatgaagaggaaattaaagccactaaccctgtggccaccgaaagatttgggaccgtggcagtcaatttccagagcagcagcacagaccccgcgaccggagatgtgcatgttatgggagccttacctggcatggtgtggcaagacagagacgtatacctgcagggtcccatttgggccaaaattcctcacacggatggacactctcacccgtctcctctcatgggcggctttggacttaagcacccgcctcctcaaatcctcatcaaaaacacgcctgttcctgcgaatcctccggcagagttttcggctacaaagtttgcttcattcatcacccagtactccacaggacaagtgagtgtggaaattgaatgggagctgcagaaagaaaacagcaagcgctggaatcccgaagtgcagtacacatccaattatgcaaaatctgccaacgttgatttcactgtggacaacaatggactttatactgagcctcgccccattggcacccgttaccttacccgtcccttg

SEQ ID NO: 3064 - DNA, 2208 bp, Artificial Sequence
  Synthetic polynucleotide
atggctgccgatggttatcttccagattggctcgaggacaacctctctgagggcattcgcgagtggtgggacttgaaacctggagccccgaaacctaaagccaaccagcaaaagcaggacgacggccggggtctggtgcttcctggctacaagtacctcggacccttcaacggactcgacaagggggagcccgtcaacgcggcggacgcagcggccctcgagcacgacaaggcctacgaccagcagctcaaagcgggtgacaatccgtacctgcggtataaccacgccgacgccgagtttcaggagcgtctgcaagaagatacgtcttttgggggcaacctcgggcgagcagtcttccaggccaagaagcgggttctcgaaccttttggtctggttgaggaaggcgctaagacggctcctggaaagaaacgtccggtagagcagtcgccacaagagccagactcctcctcgggcatcggcaagacaggccagcagcccgctaaaaagagactcaattttggtcagactggcgactcagagtcagtccccgacccacaacctctcggagaacctccagcaacccccgctgctgtgggacctactacaatggcttcaggcggtggcgcaccaatggcagacaataacgaaggcgccgacggagtgggtaatgcctcaggaaattggcattgcgattccacatggctgggcgacagagtcatcaccaccagcacccgcacctgggccttgcccacctacaataaccacctctacaagcaaatctccagtgcttcaacgggggccagcaacgacaaccactacttcggctacagcaccccctgggggtattttgatttcaacagattccactgccacttttcaccacgtgactggcagcgactcatcaacaacaattggggattccggcccaagagactcaacttcaagctcttcaacatccaagtcaaggaggtcacgacgaacgatggcgtcacgaccatcgctaataaccttaccagcacggttcaagtcttctcggattcagagtaccaactgccgtacgtcctcggctctgcgcaccagggctgcctccctccgttcccggcggacgtgttcatgattccgcagtacggctacctaacgctcaacaatggcagccaggccgtgggacgttcatccttttactgcctggaatatttcccttctcagatgctgagaacgggcaacaactttaccttcagctacacctttgaggaagtgcctttccacagcagctacgcgcacagccagagcctggaccggctgatgaatcctctcatcgacctatacctgtattacctgaacagaactcaaaatcagtccggaagtgcccaaaacaaggacttgctgtttagccgtgggtctccagctggcatgtctgttcagcccaaaaactggctacctggaccctgttatcggcagcagcgcgtttctaaaacaaaaacagacaacaacaacagcaattttacctggactggtgcttcaaaatataacctcaatgggcgtgaatccatcatcaaccctggcactgctatggcctcacacaaagacgacgaagacaagttctttcccatgagcggtgtcatgatttttggaaaagagagcgccggaacttcaaatactgcattggacaatgtcatgatcacagatgaagaggaaattaaagccactaaccctgtggccaccgaaagatttgggaccgtggcagtcaatttccagagcagcagcacagaccccgcgaccggagatgtgcatgttatgggagccttacctggcatggtgtggcaagacagagacgtatacctgcagggtcccatttgggccaaaattcctcacacggatggacactttcacccgtctcctctcatgggcggctttggacttaagcacccgcctcctcaaatcctcatcaaaaacacgcctgttcctgcgaatcctccggcagagttttcggctacaaagtttgcttcattcatcacccagtactccacaggacaagtgagtgtggaaattgaatgggagctgcagaaagaaaacagcaagcgctggaatcccgaagtgcagtacacatccaattatgcaaaatctgccaacgttgatttcactgtggacaacaatggactttatactgagcctcgccccattggcacccgttaccttacccgtcccttg

SEQ ID NO: 3065 - DNA, 2208 bp, Artificial Sequence
  Synthetic polynucleotide
atggctgccgatggttatcttccagattggctcgaggacagcctctctgagggcattcgcgagtggtgggacttgaaacctggagccccgaaacctaaagccaaccagcaaaagcaggacgacggccggggtctggtgcttcctggctacaagtacctcggacccttcaacggactcgacaagggggagcccgtcaacgcggcggacgcagcggccctcgagcacgacaaggcctacgaccagcagctcaaagcgggtgacaatccgtacctgcggtataaccacgccgacgccgagtttcaggagcgtctgcaagaagatacgtcttttgggggcaacctcgggcgagcagtcttccaggccaagaagcgggttctcgaaccttttggtctggttgaggaaggcgctaagacggctcctggaaagaaacgtccggtagagcagtcgccacaagagccagactcctcctcgggcatcggcaagacaggccagcagcccgctaaaaagagactcaattttggtcagactggcgactcagagtcagtccccgacccacaacctctcggagaacctccagcaacccccgctgctgtgggacctactacgatggcttcaggcggtggcgcaccaatggcagacaataacgaaggcgccgacggagtgggtaatgcctcaggaaattggcattgcgattccacatggctgggcgacagagtcatcaccaccagcacccgcacctgggccttgcccacctacaataaccacctctacaagcaaatctccagtgcttcaacgggggccagcaacgacaaccactacttcggctacagcaccccctgggggtattttgatttcaacagattccactgccacttttcaccacgtgactggcagcgactcatcaacaacaattggggattccggcccaagagactcaacttcaagctcttcaacatccaagtcaaggaggtcacgacgaacgatggcgtcacgaccatcgctaataaccttaccagcacggttcaagtcttctcggattcagagtaccaactgccgtacgtcctcggctctgcgcaccagggctgcctccctccgttcccggcggacgtgttcatgattccgcagtacggctacctaacgcccaacaatggcagccaggccgtgggacgttcatccttttactgcctggaatatttcccttctcagatgctgagaacgggcaacaactttaccttcagctacacctttgaggaagtgcctttccacagcagctacgcgcacagccagagcctggaccggctgatgaatcctctcatcgaccaataccagtattacctgaacagaactcaaaatcagtccggaagtgcccaaaacaaggacttgctgtttagccgtgggtctccagctggcatgtctgttcagcccaaaaactggctacctggaccctgttatcggcagcagcgcgtttctaaaacaaaaacagacaacaacaacagcaattttacctggactggtgcttcaaaatataacctcaatgggcgtgaatccatcatcaaccctggcactgctatggcctcacacaaagacgacgaagacaagttctttcccatgagcggtgtcatgatttttggaaaagagagcgccggagcttcaaatactgcattggacaatgtcatgatcacagatgaagaggaaattaaagccactaaccctgtggccaccgaaagatttgggaccgtggcagtcaatttccagagcagcagcacagaccccgcgaccggagatgtgcatgttatgggagccttacctggcatggtgtggcaagacagagacgtatacctgcagggtcccatttgggccaaaattcctcacacggatggacactttcacccgtctcctctcatgggcggctttggacttaagcacccgcctcctcaaatcctcatcaaaaacacgcctgttcctgcgaatcctccggcagagttttcggctacaaagtttgcttcattcatcacccagtactccacaggacaagtgagtgtggaaattgaatgggagctgcagaaagaaaacagcaagcgctggaatcccgaagtgcagtacacatccaattatgcaaaatctgccaacgttgatttcactgtggacaacaatggactttatactgagcctcgccccattggcacccgttaccttacccgtcccttg

SEQ ID NO: 3066 - DNA, 2208 bp, Artificial Sequence; identical to SEQ ID NO: 3057
  Synthetic polynucleotide

SEQ ID NO: 3067 - DNA, 2205 bp, Artificial Sequence
  Synthetic polynucleotide
atggctgccgatggttatcttccagattggctcgaggacactctctctgaaggaataagacagtggtggaagctcaaacctggcccaccaccaccaaagcccgcagagcggcataaggacgacagcaggggtcttgtgcttcctgggtacaagtacctcggacccttcaacggactcgacaagggagagccggtcaacgaggcagacgccgcggccctcgagcacgacaaagcctacgaccggcagctcgacagcggagacaacccgtacctcaagtacaaccacgccgacgcggagtttcaggagcgccttaaagaagatacgtcttttgggggcaacctcggacgagcagtcttccaggcgaaaaagagggttcttgaacctctgggcctggttgaggaacctgttaagacggctccgggaaaaaagaggccggtagagcactctcctgtggagccagactcctcctcgggaaccggaaaggcgggccagcagcctgcaagaaaaagattgaattttggtcagactggagacgcagactcagtacctgacccccagcctctcggacagccaccagcagccccctctggtctgggaactaatacgatggctacaggcagtggcgcaccaatggcagacaataacgagggcgccgacggagtgggtaattcctcgggaaattggcattgcgattccacatggatgggcgacagagtcatcaccaccagcacccgaacctgggccctgcccacctacaacaaccacctctacaaacaaatttccagccaatcaggagcctcgaacgacaatcactactttggctacagcaccccttgggggtattttgacttcaacagattccactgccacttttcaccacgtgactggcaaagactcatcaacaacaactggggattccgacccaagagactcaacttcaagctctttaacattcaagtcaaagaggtcacgcagaatgacggtacgacgacgattgccaataaccttaccagcacggttcaggtgtttactgactcggagtaccagctcccgtacgtcctcggctcggcgcatcaaggatgcctcccgccgttcccagcagacgtcttcatggtgccacagtatggatacctcaccctgaacaacgggagtcaggcagtaggacgctcttcattttactgcctggagtactttccttctcagatgctgcgtaccggaaacaactttaccttcagctacacttttgaggacgttcctttccacagcagctacgctcacagccagagtctggaccgtctcatgaatcctctcatcgaccagtacctgtattacttgagcagaacaaacactccaagtggaaccaccacgcagtcaaggcttcagttttctcgggccggagcgagtgacattcgggaccagtctaggaactggcttcctggaccctgttaccgccagcagcgagtatcaaagacatctgcggataacaacaacagtgaatactcgtggactggagctaccaagtaccacctcaatggcagagactctctggtgaatccgggcccggccatggcaagccacaaggacgatgaagaaaagttttttcctcagagcggggttctcatctttgggaagcaaggctcagagaaaacaaatgtggacattgaaaaggtcatgattacagacgaagaggaaatcaggacaaccaatcccgtggctacggagcagtatggttctgtatctaccaacctccagagaggcaacagacaagcagctaccgcagatgtcaacacacaaggcgttcttccaggcatggtctggcaggacagagatgtgtaccttcaggggcccatctgggcaaagattccacacacggacggacattttcacccctctcccctcatgggtggattcggacttaaacaccctcctccacagattctcatcaagaacaccccggtacctgcgaatccttcgaccaccttcagtgcggcaaagtttgcttccttcatcacacagtactccacgggacaggtcagcgtggagatcgagtgggagctgcagaaggaaaacagcaaacgctggaatcccgaaattcagtacacttccaactacaacaagtctgttaatgtggactttactgtggacactaatggcgtgtattcagagcctcgccccattggcaccagatacctgactcgtaatctg

SEQ ID NO: 3068 - protein, 736 aa, Artificial Sequence
  Synthetic polypeptide
MAADGYLPDWLEDNLSEGIREWWALKPGAPQPKANQQHQDNARGLVLPDYKYLGPGNGLDKGEPVNAADVAALEHDKAYDQQLKAGDNPYLKYNHADAEFQERLKEDTSFGGNLGRAVFQAKKRLLEPLGLVEEAAKTAPGKKRPVEQSPQEPDSSAGIGKSGAQPAKKRLNFGQTGDTESVPDPQPIGEPPAAPSGVGSLTMASGGGAPVADNNEGADGVGSSSGNWHCDSQWLGDGVITTSTRTWALPTYNNHLYKQISNSTSGGSSNDNAYFGYSTPWGYFDFNRFHCHFSPRDWQRLINNNWGFRPKRLNFKLFNIQVKEVTDNNGVKTIANNLTSTVQVFTDSDYQLPYVLGSAHEGCLPPFPADVFMIPQYGYLTLNDGSQAVGRSSFYCLEYFPSQMLRTGNNFQFSYEFENVPFHSSYAHSQSLDRLMNPLIDQYLHYLPKTINGSGQNQQTLKFSVAGPSNMAVQGRNYIPGPSYRQQRVSTTVTQNNNSEFAWPGASSWALNGRNSLMNPGPAMASYKEGEDSFFPLSGSLIFGKQGTGRDNVDADKVMITNEEEIKTTNPVATESYGQVATNHQSAQAQAQTGWVQNQGILPGMVWQDRDVYLQGPIWAKIPHTDGNFHPSPLMGGFGMKHPPPQTLIKNTPVPADPPTAFNKDKLNSFITQYSTGQVSVEIEWELQKENSKRWNPEIQYTSNYYKSNNVEFAVNTEGVYSEPRPIGTRYLTRNL

SEQ ID NO: 3069 - protein, 736 aa, Artificial Sequence
  Synthetic polypeptide
MAADGYLPDWLEDNLSEGIREWWALKPGAPQPKANQQHQDNARGLVLPGYKYLGPGNGLDKGEPVNAADAAALEHDKAYDQQLKAGDNPYLKYNHADAEFQERLKEDTSFGGNLGRAVFQAKRRLLEPLGLVEEAAKTAPGKKRPVEQSPQEPDSSAGIGKSGAQPAKKRLNFGQTGDTESVPDPQPIGEPPAAPSGVGSLTMASGGGAPVADNNEGADGVGSSSGNWHCDSQWLGDRVITTSTRTWALPTYNNHLYKQISNSTSGGSSNDNAYFGYSTPWGYFDFNRFHCHFSPRDWQRLINNNWGFRPKRLNFKLFNIQIKEVTDNNGVKTIANNLTSTVQVFTDLDYQLPYVLGSAHEGCLPPFPADVFMIPQYGYLTLNDGSQAVGRSSFYCLEYFPSQMLRTGNNFQFSYEFENVPFHSSYAHSQSLDRLMNPLIDQYLHYLSKTINGSGQNQQTLKFSVAGPSNMAVQGRNYIPGPSYRQQRVSTTVTQNNNSEFAWPGASSWALNGRNSLMNPGPAMASYKEGEDSFFPLSGSLIFGKQGTGRDNVDADKVMITNEEEIKTTNPVATESYGQVATNHQSAQAQAQTGWVQNQGILPGMVWQDRDVYLQGPIWAKIPHTDGNFHPSPLMGGFGMKHPPPQTLIKNTPVPADPPTAFNKDKLNSFITQYSTGQVSVEIEWELQKENSKRWNPEIQYTSNYYKSNNVEFAVNTEGVYSEPRPIGTRYLTRNL

SEQ ID NO: 3070 - protein, 736 aa, Artificial Sequence
  Synthetic polypeptide
MAADGYLPDWLEDNLSEGIREWWALKPGAPQPKANQQHQDNARGLVLPGYKYLGPGNGLDKGEPVSAADAAALEHDKAYDQQLKAGDNPYLKYNHADAEFQERLKEDTSFGGNLGRAVFQAKKRLLEPLGLVEEAAKTAPGKKRPVEQSPQEPDSSAGIGKSGAQPAKKRLNFGQTGDTESVSDPQPIGEPPAAPSGVGSLTMASGGGAPVADNNEGADGVGSSSGNWHCDSQWLGDRVITTSTRTWALPTYNNHLYKQISNSTSGGSSNDNAYFGYSTPWGYFDFNRFHCHFSPRDWQRLINNNWGFRPKRLNFKLFNIQVKEVTDNNGVKTIANNLTSTVQVFTDSDYQLPYVLGSAHEGCLPPSPADVFMIPQYGYLTLNDGSQAVGRSSFYCLEYFPSQMLRTGNNFQFSYEFENVPFHSSYAHSQSLDRLMNPLIDQYLHYLSKTINGSGQNQQTLKFSVAGPSNMAVQGRNYIPGPSYRQQRVSTTVTQNNNSEFAWPGASSWALNGRNSLMNPGPAMASYKEGEDSFFPLSGSLIFGKQGTGRDDVDADKVIITNEEEIKTTNPVATESYGQVATNHQSAQAQAQTGWVQNQGILPGMVWQDRDVYLQGPIWAKIPHTDGNFHPSPLMGGFGMKHPPPQTLIKNTPVPADPPTAFNKDKLNSFITQYSTGQVSVEIEWELQKENSKRWNPEIQYTSNYYKSNNVEFAVNTEGVYSEPRPIGTRYLTRNL

SEQ ID NO: 3071 - protein, 736 aa, Artificial Sequence
  Synthetic polypeptide
MAADGYLPDWLEDNLSEGIREWWALKPGAPQPKANQQHQDNARGLVLPGYKYLGPGNGLDKGEPVNAADAAALEHDKAYDQQLKAGDNPYLKYNHAGAEFQERLKEDTSFGGNLGRAVFQAKKRLLEPLGLVEEAAKTAPGKKRPVEQSPQEPDSSAGIGKSGAQPAKKRLNFGQTGDTESVPDPQPIGEPPAAPSGVGSLTMASGGGAPVADNNEGAGGVGSSSGNWHCDSQWLGDRVVTTSTRTWALPTYNNHLYKQISNSTSGGSSNDNAYFGYSTPWGYFDFNRFHCHFSPRDWQRLINNNWGFRPKRLNFKLFNIQVKEVTDNNGVKTIANNLTSTVQVFTDSDYQLPYVLGSAHGGCLPPFPADVFMIPQYGYLTLNDGSQAVGRSSFYCLEYFPSQMLRTGNNFQFSYEFENVPFHSSYAHSQSLDRLMNPLIDQYLHYLSKTINGSGQNQQTLKFSVAGPSNMAVQGRSYIPGPSYRQQRVSTTVTQNNNSEFAWPGASSWALNGRNSLMNPGPAMASYKEGEDSFFPLSGSLIFGKQGTGRDNVDADKVMITNEEEIKTTNPVATESYGQVATNHQSAQAQAQTGWVQNQGILPGMVWQDRDVYLQGPIWAKIPHTDGNFHPSPLMGGFGMKHPPPQTLIKNTPVPADPPTAFNKDKLNSFITQYSTGQVSVEIEWELQKENSKRWNPEIQYTSNYYKSNNVEFAVNTEGVYSEPRPIGTRYLTRNL

SEQ ID NO: 3072 - protein, 736 aa, Artificial Sequence
  Synthetic polypeptide
MAADGYLPDWLEDNLSEGIREWWALKPGAPQPKANQQHQDNARGLVLPGYKYLGPGNGLDKGEPVNAADAAALEHDKAYDQQLKAGDNPYLKYNHADAEFQERLKEDTSFGGNLGRAVFQAKKRLLEPLGLVEEAAKTAPGKKRPVEQSPQEPDSSAGIGKSGAQPAKKRLNFGQTGDTESVPDPQPIGEPPAAPSGVGSLTMASGGGAPVADNNEGADGVGSSSGNWHCDSQWLGDRVVTTSTRTWALPTYNNHLYKQISNSTSGGSSNDNAYFGYSTPWGYFDFNRFHCHFSPRDWQRLINNNWGFRPKRLNFKLFNIQVKEVTDNNGVKTIANNLTSTVQVFTDSDYQLPYVLGSAHEGCLPPFPADVFMIPQYGYLTLNDGSQAVGRSSFYCLEYFPSQMLRTGNNFQFSYEFENVPFHSSHAHSQSLDRLMNPLIDQYLHYLSKTINGSGQNQQTLKFSVAGHSNMAVQGRNYIPGPSYRQQRVSTTVTQNNNSEFAWPGASSWALNGRNSLMNPGPAMASYKEGEDSFFPLSGSLIFGKQGTGRDNVDADKVMITNEEEIKTTNPVATESYGQVATNHQSAQAQAQTGWVQNQGILPGMVWQDRDVYLQGPIWAKIPHTDGNFHPSPLMGGFGMKHPPPQTLIKNTPVPADPPTAFNKDKLNSFITQYSTGQVSVEIGWELQKENSKRWNPEIQYTSNYYKSNNVEFAVNTEGVYSEPRPIGTRYLTRNL

SEQ ID NO: 3073 - protein, 736 aa, Artificial Sequence
  Synthetic polypeptide
MAADGYLPDWLEDNLSEGIREWWALKPGAPQPKANQQHQDNARGLVLPGYKYLGPGNGLDKGEPVNAADAAALEHDKAYDQQLKAGDNPYLKYNHADAEFQERLKEDTSFGGNLGRAVFQAKKRLLEPLGLVEEAAKTAPGKKRPVEQSPQEPDSSAGIGKSGAQPAKKRLNFGQTGDTESVPDPQPIGEPPAAPSGVGSLTMASGGGAPVADNNEGADGVGSSSGNWHCDSQWLGDRVITTSTRTWALPTYNNRLYKQISNSTSGGSSNDNAYFGYSTPWGYFDFNRFHCHFSPRDWQRLINNNWGFRPKRLNFKPFNIQVKEVTDNNGVKTIANNLTSTVQVFTDSDYQLPYVLGSAHEGCLPPFPADVFMIPQYGYLTLNDGSQAVGRSSFYCLEYFPSQMLRTGNNFQFSYEFENVPFHSSYAHSQSLDRLMNPLIDQYLHYLSKTINGSGQNQQTLKFSVAGPSNMAVQGRNYIPGPSYRQQRVSTTVTQNNNSEFAWPGASSWALNGRNSLMNPGPAMASYKEGEDSFFPLSGSLIFGKQGTGRDNVDADKVMITNEEEIKTTNPVATESYGQVATNHQSAQAQAQTGWVQNQGILPGMVWQDRDVYLQGPIWAKIPHTDGNFHPSPLMGGFGMKHPPPQTLIKNTPVPADPPTAFNKDKLNSFITQYSTGQVSVEIEWELQKENSKRWNPEIQYTSNYYKSNNVEFAVNTEGVYSEPRPIGTRYLTRNL

SEQ ID NO: 3074 - protein, 736 aa, Artificial Sequence
  Synthetic polypeptide
MAADGYLPDWLEDNLSEGIREWWALKPGAPQPKANQQHQDNARGLVLPGYKYLGPGNGLDKGEPVNAADAAALEHDKAYDQQLKAGDNPYLKYNHADAEFQERLKEDTSFGGNLGRAVFQAKKRLLEPLGLVEEAAKTAPGKKRPVEQSPQEPDSSAGIGKSGAQPAKKRLNFGQTGDTESVPDPQPIGEPPAAPSGVGSLTMASGGGAPVADNNEGADGVGSSSGNWHCDSQWLGDRVITTSTRTWALPTYNNHLYKQISNSTSGGSSNDNAYFGYSTPWGYFDFNRFHCHFSPRDWQRLINNNWGFRPKRLNFKLFNIQVKEVTDNNGVKTIANNLTSTVQVFTDSDYQLPYVLGSAHEGCLPPFPADVFMIPQYGYLTLNDGSQAVGRSSFYCLEYFPSQMLRTGNNFQFSYEFENVPFHSSYAHSQSLDRLMNPLIDQYLHYLSKTINGSGQNQQTLKFSVAGPSNMAVQGRNYIPGPSYRQQRVSTTVTQNNNSEFAWPGASSWALNGRNSLMNPGPAMASYKEGEDSFFPLSGSLIFGKQGTGRDNVDADKVMITNEEEIKTTNPVATESYGQVATNHQSAQAQAQTGWVQNQGILPGMVWQDRDVYLQGPIWAKIPHTDGNFHPSPLMGGFGMKHPPPQTLIKNTPVPADPPTAFNKDKLNSFITQYSTGQVSVEIEWELQKENSKRWNPEIQYTSNYYKSNNVEFAVNTEGVYSEPRPIGTRYLTRNL

SEQ ID NO: 3075 - protein, 736 aa, Artificial Sequence; identical to SEQ ID NO: 3074
  Synthetic polypeptide

SEQ ID NO: 3076 - protein, 736 aa, Artificial Sequence
  Synthetic polypeptide
MAADGYLPDWLEDNLSEGIREWWDLKPGAPKPKANQQKQDDGRGLVLPGYKYLGPFNGLDKGEPVNAADAAALEHDKAYDQQLKAGDNPYLRYNHADAEFQERLQEDTSFGGNLGRAVFQAKKRVLEPFGLVEEGAKTAPGKKRPVEQSPQEPDSSSGIGKSGQQPAKKRLNFGQTGDSESVPDPQPLGEPPATPAALGPTTMASGGGAPMADNNEGADGVGNASGNWHCDSTWLGDRVITTSTRTWALPTYNNHLYKQISSASTGASNDNHYFGYSTPWGYFDFNRFHCHFSPRDWQRLINNNWGFRPKRLNFKLFNIQVKEVTTNDGVTTIANNLTSTVQVFSDSEYQLPYVLGSAHQGCLPPFPADVFMIPQYGYLTLNNGSKAVGRSSFYCLEYFPSQMLRTGNNFTFSYTFEEVPFHSSYAHSQSLDRLMNPLIDQYLYYLNRTQNQSGSAQNKDLLFSRGSPAGMSVQPKNWLPGPCYRQQRVSKTKTDNNNSNFTWTGASKYNLNGRESIINPGTAMASHKDDEDKFFPMSGVMIFGKESAGASNTALDNVMITDEEEIKATNPVATERFGTVAVNFQSSSTDPATGDVHVMGALPGMVWQDRDVYLQGPIWAKIPHTDGHFHPSPLMGGFGLKHPPPQILIKNTPVPANPPAEFSATKFASFITQYSTGQVSVEIEWELQKENSKRWNPEVQYTSNYAKSANVDFTVDNNGLYTEPRPIGTRYLTRPL

SEQ ID NO: 3077 - protein, 736 aa, Artificial Sequence
  Synthetic polypeptide
MAADGYLPDWLEDNLSEGIREWWDLKPGAPKPKANQQKQDDGRGLVLPGYKYLGPFNGLDKGEPVNAADAAALEHDKAYDQQLKAGDNPYLRYNHADAEFQERLQEDTSFGGNLGRAVFQAKKRVLEPLGLVEEGAKTAPGKKRPVEQSPQEPDSSSGIGKTGQQPAKKRLNFGQTGDSESVPDPQPLGEPPATPAAVGPTTMASGGGAPMADNNEGADGVGNASGNWHCDSTWLGDRVITTSTRTWALPTYNNHLYKQISSTSTGASNDNHYFGYSTPWGYFDFNRFHCHFSPRDWQRLINNNWGFRPKRLNFKLFNIQVKEVTTNDGVTTIANNLTSTVQVFSDSEYQLPYVLGSAHQGCLPPFPADVFMIPQYGYLTLNNGSQAVGRSSFYCLEYFPSQMLRTGNNFTFSYTFEEVPFHSSYAHSQSLDRLMNPLIDQYLYYLNRTQNQSGSAQNKDLLFSRGSPAGMSVQPKNWLPGPCYRQQRVSKTKTDNNNSNFTWTGASKYNLNGRESIINPGTAVASHKDDEDKFFPMSGVMIFGKESAGASNTALDNVMITDEEEIKATNPVATERFGTVAVNFQSSSTDPATGDVHAMGALPGMVWQDRDVYLQGPIWAKIPHTDGHFHPSPLMGGFGLKNPPPQILIKNTPVPANPPAEFSATKFASFITQYSTGQVSVEIEWELQKENSKRWNPEVQYTSNYAKSANVDFTVDNNGLYTEPRPIGTRYLTRPL

SEQ ID NO: 3078 - protein, 736 aa, Artificial Sequence
  Synthetic polypeptide
MAADGYLPDWLEDNLSEGIREWWALKPGAPQPKANQQHQDNARGLVLPGYKYLGPGNGLDKGEPVNAADAAALEHDKAYDQQLKAGDNPYLKYNHADAEFQERLKEDTSFGGNLGRAVFQAKKRLLEPLGLVEEAAKTAPGKKRPVEQSPQEPDSSAGIGKSGAQPAKKRLNFGQTGDTESVPDPQPIGEPPAAPSGVGSLTMASGGGAPVADNNEGADGVGSSSGNWHCDSQWLGDRVITTSTRTWALPTYNNHLYKQISNSTSGGSSNDNAYFGYSTPWGYFDFNRFHCHFSPRDWQRLINNNWGFRPKRLNFKLFNIQVKEVTDNNGVKTIANNLTSTVQVFTDSDYQLPYVLGSAHEGCLPPFPADVFMIPQYGYLTLNDGSQAVGRSSFYCLEYFPSQMLRTGNNFQFGYEFENVPFHSSYAHSQSLDRLMNPLIDQYLYYLSKTINGSGQNQQTLKFSVAGPSNMAVQGRNYIPGPSYRQQRVSTTVTQNNNSEFAWPGASSWALNGRNSLMNPGPAMASHKEGEDRFFPLSGSLIFGKQGTGRDNVDADKVMITNEEEIKTTNPVATESYGQVATNHQSAQAQAQTGWVQNQGILPGMVWQDRDVYLQGPIWAKIPHTDGNFHPSPLMGGFGMKHPPPQILIKNTPVPADPPTAFNKDKLNSFITQYSTGQVSVEIEWELQKENSKRWDPEIQYTSNYYKSNNVEFAVNTEGVYSEPRPIGTRYLTRNL

SEQ ID NO: 3079 - protein, 736 aa, Artificial Sequence
  Synthetic polypeptide
MAADGYLPDWLEDNLSEGIREWWALKPGAPQPKANQQHQDNARGLVLPGYKYLGPGNGLDKGEPVNAADAAALEHDKAYDQQLKAGDNPYLKYNHADAEFQERLKEDTSFGGNLGRAVFQAKKRLLEPLGLVEEAAKTAPGKKRPVEQSPQEPDSSAGIGKSGAQPAKKRLNFGQTGDTESVPDPQPIGEPPAAPSGVGSLTMASGGGAPVADNNEGADGVGSSSGNWHCDSQWLGDRVITTSTRTWALPTYNNHLYKQISNSTSGGSSNDNAYFGYSTPWGYFDFNRFHCRFSPRDWQRLINNNWGFRPKRLNFKLFNIQVKEVTDNNGVKTIANNLTSTVQVFTDSDYQLPYVLGSAHEGCLPPFPADVFMIPQYGYLTLNDGSQAVGRSSFYCLEYFPSQMLRTGNNFQFSYEFENVPFHSSYAHSQSLDRLMNPLIDQYLYYLSKTINGSGQNQQTLKFSVAGPSNMAVQGRNYIPGPSYRQQRVSTTVTQNNNSEFAWPGASSWALNGRNSLMNPGPAMASHKEGEDRFFPLSGSLIFGKQGTGRDNVDADKVMITNEEEIKTTNPVATESYGQVATNHQSAQAQAQTGWVQNQGILPGMVWQDRDVYLQGPIWAKIPHTDGNFHPSPLMGGFGMKHPPPQILIKNAPVPADPPTAFNKDKLNSFITQYSTGQVSVEIEWELQKENSKRWNPEIQYTSNYYKSNNVEFAVNTEGVYSEPRPIGTRYLTRNL

SEQ ID NO: 3080 - protein, 736 aa, Artificial Sequence
  Synthetic polypeptide
MAADGYLPDWLEDNLSEGIREWWALKPGAPQPKANQQHQDNARGLVLPGYKYLGPGNGLDKGEPVSAADAAALEHDKAYDQQLKAGDNPYLKYNHADAEFQERLKEDTSFGGNLGRAVFQAKKRLLEPLGLVEEAAKTAPGKKRPVEQSPQEPDSSAGIGKSGAQPAKKRLNFGQTGDTESVPDPQPIGEPPAAPSGVGSLTMASGGGAPVADNNEGADGVGSSSGNWHCDSQWLGDRVITTSTRTWALPTYNNHLYKQISNSTSGGSSNDNAYFGYSTPWGYFDFNRFHCHFSPRDWQRLINNNWGFRPKRLNFKLFNIQVKEVTDNNGVKTIANNLTSTVQVFTDSDYQLPYVLGSAHEGCLPPFPADVFMIPQYGYLTLNDGSQAVGRSSFYCLEYFPSQMLRTGNNFQFSYEFENVPFHSSYAHSQSLDRLMNPLIDQYLYYLSKTINGSGQNQQTLKFSVAGPSNMAVQGRNYIPGPSYRQQRVSTTVTQNNNSEFAWPGASSWALNGRNSLMNPGPAMASHKEGEDRFFPLSGSLIFGKQGTGRDNVDADKVMITNEEEIKTTNPVATESYGQVATNHQSAQAQAQTGWVQNQGILPGMVWQDRDVYLQGPIWAKIPHTDGNFHPSPLMGGFGMKHPPPQILIKNTPVPADPPTAFNKDKLNSFITQYSTGQVSVEIEWELQKENSKRWNPEIQYTSNYYKSNNVEFAVNTEGVYSEPRPIGTRYLTRNL

SEQ ID NO: 3081 - protein, 736 aa, Artificial Sequence
  Synthetic polypeptide
MAADGYLPDWLEDNLSEGIREWWALKPGAPQPKANQQHQDNARGLVLPGYKYLGPGNGLDKGEPVNAADAAALEHDKAYDQQLKAGDNPYLKYNHADAEFQERLKEDTSFGGNLGRAVFQAKKRLLEPLGLVEEAAKTAPGKKRPVEQSPQEPDSSAGIGKSGAQPAKKRLNFGQTGDTESVPDPQPIGEPPAAPSGVGSLTMASGGGAPVADNNEGADGVGSSSGNWHCDSQWLGDRVITTSTRTWALPTYNNHLYKQISNSTSGGSSNDNAYFGYSTPWGYFDFNRFHCHFSPRDWQRLINNNWGFRPKRLNFKLFNIQVKEVTDNNGVKTIANNLTSTVQVFTDSDYQLPYVLGSAHEGCLPPFPADVFMIPQYGYLTLNDGSQAVGRSSFYCLEYFPSQMLRTGNNFQFSYEFENVPFHSSYAHSQSLDRLMNPLIDQYLYYLSKTINGSGQNQQTLKFSVAGPSNTAVQGRNYIPGPSYRQQRVSTTVTQNNNSEFAWPGASSWALNGRNSLMNPGPAMASHKEGEDRFFPLSGSLIFGKQGTGRDNVDADKVMITNEEEIKTTNPVATESYGQVATNHQSAQAQAQTGWVQNQGILPGMVWQDRDVYLQGPIWAKIPHTDGNFHPSPLMGGFGMKHPPPQILIKNTPVPADPPTAFNKDKLNSFITQYSTGQVSVEIEWELQKENSKRWNPEIQYTSNYYKSNNVEFAVNTEGVYSEPRPIGTRYLTRNL

SEQ ID NO: 3082 - protein, 736 aa, Artificial Sequence
  Synthetic polypeptide
MAADGYLPDWLEDNLSEGIREWWALKPGAPQPKANQQHQDNARGLVLPGYKYLGPGNGLDKGEPVNAADAAALEHDKAYDQQLKAGDNPYLKYNHADAEFQERLKEDTSFGGNLGRAVFQAKKRLLEPLGLVEEAAKTAPGKKRPVEQSPQEPDSSAGIGKSGAQPAKKRLNFGQTGDTESVPDPQPIGEPPAAPSGVGSLTMASGGGAPVADNNEGADGVGSSSGNWHCDSQWLGDRVITTSTRTWALPTYNNHLYKQISNSTSGGSSNDNAYFGYSTPWGYFDFNRFHCHFSPRDWQRLINNNWGFRPKRLNFKLFNIQVKEVTDNNGVKTIANNLTSTVQVFTDSDYQLPYVLGSAHEGCLPPFPADVFMIPQYGYLTLNDGSQAVGRSSFYCLEYFPSQMLRTGSNFQFSYEFENVPFHSSYAHSQSLDRLMNPLIDQYLYYLSKTINGSGQNQQTLKFSVAGPSNMAVQGRNYIPGPSYRQQRVSTTVTQNNNSEFAWPGASSWALNGRNSLMNPGPAMASHKEGEDRFFPLSGSLIFGKQGTGRDNVDADKVMITNEEEIKTTNPAATESYGQVATNHQSAQAQAQTGWVQNQGILPGMVWQDRDVYLQGPIWAKIPHTDGNFHPSPLMGGFGMKHPPPQILIKNTPVPADPPTAFNKDKLNSFITQYSTGQVSVEIEWELQKENSKRWNPEIQHTSNYYKSNNVEFAVNTEGVYSEPRPIGTRYLTRNL

SEQ ID NO: 3083 - protein, 736 aa, Artificial Sequence
  Synthetic polypeptide
MAADGYLPDWLEDNLSEGIREWWALKPGAPQPKANQQHQDNARGLVLPGYKYLGPGNGLDKGEPVNAADAAALEHDKAYDQQLKAGDNPYLKYNHADAEFQERLKEDTSFGGNLGRAVFQAKKRLLEPLGLVEEAAKTAPGKKRPVEQSPQEPDSSAGIGKSGAQPAKKRLNFGQTGDTESVPDPQPIGEPPAAPSGVGSLTMASGGGAPVADNNEGADGVGSSSGNWHCDSQWLGDRVITTSTRTWALPTYNNHLYKQISNSTSGGSSNDNAYFGYSTPWGYFDFNRFHCHFSPRDWQRLINNNWGFRPKRLNFRLFNIQVKEVTDNNGVKTIANNLTSTVQVFTDSDYQLPYVLGSAHEGCLPPFPADVFMIPQYGYLTLNDGSQAVGRSSFYCLEYFPSQMLRTGNNFQFSYEFENVPFHSSYAHSQSLDRLMNPLIDQYLYYLSKTINGSGQNQQTLKFSVAGPSNMAVQGRNYIPGPSYRQQRVSTTVTQNNNSEFAWPGASSWALNGRNSLMNPGPAMASHKEGEDRFFPLSGSLIFGKQGTGRDNVDADKVMITNEEEIKTTNPVATESYGQVATNHQSAQAQAQTGWVQSQGILPGMVWQDRDVYLQGPIWAKIPHTDGNFHPSPLMGGFGMKHPPPQILIKNTPVPADPPTAFNKDKLNSFITQYSTGQVSVEIEWELQKENSKRWNPEIQYTSNYYKSNNVEFAVNTEGVYSEPRPIGTRYLTRNL

SEQ ID NO: 3084 - protein, 735 aa, Artificial Sequence
  Synthetic polypeptide
MAADGYLPDWLEDNLSEGIREWWALKPGAPQPKANQQHQDNARGLVLPGYKYLGPGNGLDKGEPVNAADAAALEHDKAYDQQLKAGDNPYLKYNHADAEFQERLKEDTSFGGNLGRAVFQAKKRLLEPLGLVEEAAKTAPGKKRPVEQSPQEPDSSAGIGKSGAQPAKKRLNFGQTGDTESVPDPQPIGEPPAAPSGVGSLTMASGGGAPVADNNEGADGVGSSSGNWHCDSQWLGDRVITTSTRTWALPTYNNHLYKQISNSTSGGSSNDNAYFGYSTPWRYFDFNRFHCHFSPRDWQRLINNWGFRPKRLNFKLFNIQVKEVTDNNGVKTIANNLTSTVQAFTDSDYQLPYVLGSAHEGCLPPFPADVFMIPQYGYLTLNDGSQAVGRSSFYCLEYFPSQMLRTGNNFQFSYEFENVPFHSSYAHSQSLDRLMNPLIDQYLYYLSKTINGSGQNQQTLKFSVAGPSNMAVQGRNYIPGPSYRQQRVSTTVTQNNNSEFAWPGASSWALNGRNSLMNPGPAMASHKEGEDRFFPLSGSLIFGKQGTGRDNVDADKVMITNEEEIKTTNPVATESYGQVATNHQSAQAQAQTGWVQNQGILPGMVWQDRDVYLQGPIWAKIPHTDGNFHPSPLMGGFGMKHPPPQILIKNTPVPADPPTAFNKDELNSFITQYSTGQVSVEIEWELQKENSKRWNPEIQYTSNYYKSNNVEFAVNTEGVYSEPRPIGTRYLTRNL

SEQ ID NO: 3085 - protein, 735 aa, Artificial Sequence
  Synthetic polypeptide
MAADGYLPDWLEDNLSEGIREWWALKPGAPQPKANQQHQDNARGLVLPGYKYLGPGNGLDKGEPVNAADAAALEHDKAYDQQLKAGDNPYLKYNHADAEFQERLKEDTSFGGNLGRAVFQDKKRLLEPLGLVEEAAKTAPGKKRPVEQSPQEPDSSAGIGKSGAQPAKKRLNFGQTGDTESVPDPQPIGEPPAAPSGVGSLTMASGGGAPVADNNEGADGVGSSSGNWHCDSQWLGDRVITTSTRTWALPTYNNHLYKQISNSTSGGSSNDNAYFGYSTPWGYFDFNRFHCHFSPRDWQRLINNWGFRPKRLNFKLFNIQVKEVTDNNGVKTIANNLTSTVQVFTDSDYQLPYVLGSAHEGCLPPFPADVFMIPQYGYLTLNDGSQAVGRSSFYCLEYFPSQMLRTGNNFQFSYEFENVPFHSSYAHSQSLDRLMNPLIDQYLYYLSKTINGSGQNQQTLKFSVAGPSNMAVQGRNYIPGPSYRQQRVSTTVTQNNNSEFAWPGASSWALNGRNSLMNPGPAMASHKEGEDRFFPLSGSLIFGKQGTGRDNVDADKVMITNEEEIKTTNPVATESYGQVATNHQSAQAQAQTGWVQNQGILPGMVWQDRDVYLQGPIWAKIPHTDGNFHPSPLMGGFGMKHPPPQILIKNTPVPADPPTAFNKDKLNSFITQYSTGQVSVEIEWELQKENSKRWNPEIQYTSNYYKSNNVEFAVNTEGVYSEPRPIGTRYLTRNL

SEQ ID NO: 3086 - protein, 736 aa, Artificial Sequence
  Synthetic polypeptide
MAADGYLPDWLEDNLSEGIREWWALKPGAPQPKANQQHQDNARGLVLPGYKYLGPGNGLDKGEPVNAADAAALEHDKAYDQQLKAGDNPYLKYNHADAEFQERLKEDTSFGGNLGRAVFQAKKRLLEPLGLVEEAAKTAPGKKRPVEQSPQEPDSSAGIGKSGAQPAKKRLNFGQTGDTESVPDPQPIGEPPAAPSGVGSLTMASGGGAPVADNNEGADGVGSSSGNWHCDSQWLGDRAITTSTRTWALPTYNNHLYKQISNSTSGGSSNDNAYFGYSTPWGYFDFNRFHCHFSPRDWQRLINNNWGFRPKRLNFKLFNIQVKEVTDNNGVKTIANNLTSTVQVFTDSDYQLPYVLGSAHEGCLPPFPADVFMIPQYGYLTLNDGSQAVGRSSFYCLEYFPSQMLRTGNNFQFSYEFENVPFHSSYAHSQSLDRLMNPLIDQYLYYLSKTINGSGQNQQTLKFSVAGPSNMAVQGRNYIPGPSYRQQRVSTTVTQNNNSEFAWPGASSWALNGRNSLMNPGPAMASHKEGEDRFFPLSGSLIFGKQGTGRDNVDADKVMTTNEEEIKTTNPVATESYGQVATNHQSAQAQAQTGWVQNQGILPGMVWQDRDVYLQGPIWAKIPHTDGNFHPSPLMGGFGMKHPPPQILIKNTPVPADPPTAFNKDKLNSFITQYSTGQVSVEIEWELQKENSKRWNPEIQYTSNYYKSNNVEFAVNTEGVYSEPRPIGTRYLTRNL

SEQ ID NO: 3087 - protein, 736 aa, Artificial Sequence
  Synthetic polypeptide
MAADGYLPDWLEDNLSEGIREWWALKPGAPQPKANQQHQDNARGLVLPGYKYLGPGNGLDKGEPVNAADAAALEHDKAYDQQLKAGDNPYLKYNHADAEFQERLKEDTSFGGNLGRAVFQTKKRLLEPLGLVEEAAKTAPGKKRPVEQSPQEPGSSAGIGKSGAQPAKKRLNFGQTGDTESVPDPQPIGEPPAAPSGVGSLTMASGGGAPVADNNEGADGVGSSSGNWHCDSQWLGDRVITTSTRTWALPTYNNHLYKQISNSTSGGSSNDNAYFGYSTPWGYFDFNRFHCHFSPRDWQRLINNNWGFRPKRLNFKLFNIQVKEVTDNNGVKTIANNLTSTVQVFTDSDYQLPYVLGSAHEGCLPPFPADVFMIPQYGYLTLNDGSQAVGRSSFYCLEYFPSQMLRTGNNFQFSYEFENVPFHSSYAHSQSLDRLMNPLIDQYLHYLSKTINGSGQNQQTLKFSVAGPSNMAVQGRNYIPGPSYRQQRVSTTVTQNNNSEFAWPGASSWALNGRNSLMNPGPAMASHKEGEDRFFPLSGSLIFGKQGTGRDNVDADKVMITNEEEIKTTNPVATESYGQVATNHQSAQAQAQTGWVQNQGILPGMVWQDRDVYLQGPIWAKIPHTDGNFHPSPLMGGFGMKHPPPQILIKNTPVPADPPTAFNKDKLNSFITQYSTGQVSVEIEWELQKENSKRWNPEIQYTSNYYKSNNVEFAVNTEGVYSEPRPIGTRYLTRNL

SEQ ID NO: 3088 - protein, 736 aa, Artificial Sequence
  Synthetic polypeptide
MAADGYFPDWLEDNLSEGIREWWALKPGAPQPKANQQHQDNARGLVLPGYKYLGPGNGLDKGEPVNAADAAALEHDKAYDQQLKAGDNPYLKYNHADAEFQERLKEDTSFGGNLGRAVFQAKKRLLEPLGLVEEAAKTAPGKKRPVEQSPQEPDSSAGIGKSGAQPAKKRLNFGQTGDTESVPDPQPIGESPAAPSGVGSLTMASGGGAPVADNNEGADGVGSSSGNWHCDSQWLGDRVITTSTRTWALPTYNNHLYKQISNSTSGGSSNDNAYFGYSTPWGYFDFNRFHCHFSPRDWQRLINNNWGFRPKRLNFKLFNIQVKEVTDNNGVKTIANNLTSTVQVFTDSDYQLPYVLGSAHEGCLPPFPADVFMIPQYGYLTLNDGSQAVGRSSFYCLEYLPSQMLRTGNNFQFSYEFENVPFHSSYAHSQSLDRLMNPLIDQYLHYLSKTINGSGQNQQTLKFSVAGPSNMAVQGRNYIPGPSYRQQRVSTTVTQNNNSEFAWPGASSWALNGRNSLMNPGPAVASHKEGEDRFFPLSGSLIFGKQGTGRDNVDADKVMITNEEEIKTTNPVATESYGQVATNHQSAQAQAQTGWVQNQGILPGMVWQDRDVYLQGPIWAKIPHTDGNFHPSPLMGGFGMKHPPPQILIKNTPVPADPPTAFNKDKLNSFITQYSTGQVSVEIEWELQKENSKRWNPEIQYTSNYYKSNNVEFAVNTEGVYSEPRPIGTRYLTRNL

SEQ ID NO: 3089 - protein, 736 aa, Artificial Sequence
  Synthetic polypeptide
MAADGYLPDWLEDNLSEGIREWWALKPGAPQPKANQQHQDNARGLVLPGYKYLGPGNGLDKGEPVNAADAAALEHDKAYDQQLKAGDNPYLKYNHADAEFQERLKEDTSFGGNLGRAVFQAKKRLLEPLGPVEEAAKTAPGKKRPVEQSPQEPDSSAGIGKSGAQPAKKRLNFGQTGDTESVPDPQPIGEPPAAPSGVGSLTMASGGGAPVADNNEGADGVGSSSGNWHCDSQWLGDRVITTSTRTWALPTYNNHLYKQISNSTSGGSSNDNAYFGYSTPWGYFDFNRFHCHFSPRDWQRLINNNWGFRPKRLNFKLFNIQVKEVTDNNGVKTIANNLTSTVQVFTDSDYQLPYVLGSAHEGCLPPFPADVFMIPQYGYLTLNDGSQAVGRSSFYCLEYFPSQMLRTGNNFQFSYEFENVPFHSSYAHSQSLDRLMNPLIDQYLYYLSKTINGSGQNQQTLKFSVAGPSNMAVQGRNYIPGPSYRQQRVSTTVTQNNNSEFAWPGASSWALNGRNSLMNPGPAMASHKEGEDRFFPLSGSLIFGKQGTGRDNVDADKVMITNEEEIKTTNPVATESYGQAATNHQSAQAQAQTGWVQNQGILPGMVWQDRDVYLQGPIWAKIPHTDGNFHPSPLMGGFGMKHPPPQILIKNTPVPADPPTAFNKDKLNSFITQYSTGQVSVEIEWELQKENSKRWNPEIQYTSNYYKSNNVEFAVNTEGVYSEPRPIGTRYLTRNL

SEQ ID NO: 3090 - protein, 736 aa, Artificial Sequence
  Synthetic polypeptide
MAADGYLPDWLEDNLSEGIREWWALKPGAPQPKANQQHQDNARGLVLPGYKYLGPGNGLDKGEPVNAADAAALEHDKAYDQQLKAGDNPYLKYNHADAEFQERLKEDTSFGGNLGRAVFQAKKRLLEPLGPVEEAAKTAPGKKRPVEQSPQEPDSSAGIGKSGAQPAKKRLNFGQTGDTESVPDPQPIGEPPAAPSGVGSLTMASGGGAPVADNNEGADGVGSSSGNWHCDSQWLGDRVITTSTRTWALPTYNNHLYKQISNSTSGGSSNDNAYFGYSTPWGYFDFNRFHCHFSPRDWRRLINNNWGFRPKRLNFKLFNIQVKEVTDNNGVKTIANNLTSTVQVFTDSDYQLPYVLGSAHEGCLPPFPADVFMIPQYGYLTLNDGSQAVGRSSFYCLEYFPSQMLRTGNNFQFSYEFENVPFHSSYAHSQSLDRLMNPLIDQYLYYLSKTINGSGQNQQTLKFSVAGPSNMAVQGRNYIPGPSYRQQRVSTTVTQNNNSEFAWPGASSWALNGRNSLMNPGPAMASHKEGEDRFFPLSGSLIFGKQGTGRDNVDADKVMITNEEEIKTTNPVATESYGQVATNHQSAQAQAQTGWVQNQGILPGMVWQDRDVYLQGPIWAKIPHTDGNFHPSPLMGGFGMKHPPPQILIKNTPVPADPPTAFNKDKLNSFITQYSTGQVSVEIEWELQKENSKRWNPEIQYTSNYYKSNNVEFAVNTEGVYSEPRPIGTRYLTRNL

SEQ ID NO: 3091 - protein, 736 aa, Artificial Sequence
  Synthetic polypeptide
MAADGYLPDWLEDNLSEGIREWWALKPGAPQPKANQQHQDNARGLVLPGYKYLGPGNGLDKGEPVNAADAAALEHDKAYDQQLKAGDNLYLKYNHADAEFQERLKEDTSFGGNLGRAVFQAKKRLLEPLGLVEEAAKTAPGKKRPVEQSPQEPDSSAGIGKSGAQPAKKRLNFGQTGDTESVPDPQPIGEPPAAPSGVGSLTMASGGGAPVADNNEGADGVGSSSGNWHCDSQWLGDRVITTSTRTWALPTYNNHLYKQISNSTSGGSSNDNAYFGYSTPWGYFDFNRFHCHFSPRDWQRLINNNWGFRPKRLNFKLFNIQVKEVTDNNGVKTIANNLTSTVQVFTDSDYQLPYVLGSAHEGCLPPFPADVFMIPQYGYLTLNDGSQAVGRSSFYCLEYFPSQMLRTGNNFQFSYEFENVPFHSSYAHSQSLDRLMNPLIDQYLHYLSKTINGSGQNQQTLKFSVAGPSNMAVQGRNYIPGPSYRQQRVSTTVTQNNNSEFAWPGASSWALNGRNSLMNPGPAMASHKEGEDRFFPLSGSLIFGKQGTGRDNVDADKVMITNEEEIKTTNPVATESYGQVATNHQSAQAQAQTGWVQNQGILPGMVWQDRDVYLQGPIWAKIPHTDGNFHPSPLMGGFGMKHPPPQILIKNTPVPADPPTAFNKDKLNSFITQYSTGQVSVEIEWELQKENSKRWNPEIQYTSNYYKSNNVEFAVNTEGVYSEPRPIGTRYLTRNL

SEQ ID NO: 3092 - protein, 736 aa, Artificial Sequence
  Synthetic polypeptide
MAADGYLPDWLEDNLSEGIREWWALKPGAPQPKANQQHQDNARGLVLPGYKYLGPGNGLDKGEPVNAADAAALEHDKAYDQQLKAGDNPYLKYNHADAEFQERLKEDTSFGGNLGRAVFQAKKRLLEPLGLVEEAAKTAPGKKRPVEQSPQEPDSSAGIGKSGAQPAKKRLNFGQTGDTESVPDPQPIGEPPAAPSGVGSLTMASGGGAPVADNNEGADGVGSSSGNWHCDSQWLGDRVITTSTRTWALPTYNNHLYKQISNSTSGGSSNDNAYFGYSTPWGYFDFNRFHCHFSPRDWQRLINNNWGFRPKRLNFKLFNIQVKEVTDNNGVKTIANNLTSTVQVFTDSDYQLPYVLGSAHEGCLPPFPADVFMIPQYGYLTLNDGSQAVGRSSFYCLEYFPSQMLRTGNNFQFSYEFENVPFHSSYAHSQSLDRLMNPLIDQYLHYLSKTINGSGQNQQTLKFSVAGPSNMAVQGRNYIPGPSYRQQRVSTTVTQNNNSEFAWPGASSWALNGRNSLMNPGPAMASHKEGEDRFFPLSGSLIFGKQGTGRDNVDADKVMITNEEEIKTTNPVATESYGQVATNHQSAQAQAQTGWVQNQGILPGMVWQDRDVYLQGPIWAKIPHTDGNFHPSPLMGGFGMKHPPPQILIKNTPVPADPPTAFNKDKLNSFITQYSTGQVSVEIEWELQKENSKRWNPEIQYTSNYYKSNNVEFAVNTEGVYSEPRPIGTRYLTRNL

SEQ ID NO: 3093 - protein, 736 aa, Artificial Sequence
  Synthetic polypeptide
  MOD_RES (442)..(442): Any naturally occurring amino acid
MAADGYLPDWLEDNLSEGIREWWALKPGAPQPKANQQHQDNARGLVLPGYKYLGPGNGLDKGEPVNAADAAALEHDKAYDQQLKAGDNPYLKYNHADAEFQERLKEDTSFGGNLGRAVFQAKKRLLEPLGLVEEAAKTAPGKKRPVEQSPQEPDSSAGIGKSGAQPAKKRLNFGQTGDTESVPDPQPIGEPPAAPSGVGSLTMASGGGAPVADNNEGADGVGSSSGNWHCDSQWLGDRVITTSTRTWALPTYNNHLYKQISTSTSGGSSNDNAYFGYSTPWGYFDFNRFHCHFSPRDWQRLINNNWGFRPKRLNFKLFNIQVKEVTDNNGVKTIANNLTSTVQVFTDSDYQLPYVLGSAHEGCLPPFPADVFMIPQYGYLTLNDGSQAVGRSSFYCLEYFPSQMLRTGNNFQFSYEFENVPFHSSYAHSQSLDRLMNPLIDXYLHYLSKTINGSGQNQQTLKFSVAGPSNMAVQGRNYIPGPSYRQQRVSTTVTQNNNSEFAWPGASSWALNGRNSLMNPGPAMASHKEGEDRFFPLSGSLIFGKQGTGRDNVDADKVMITNEEEIKTTNPVATESYGQVATNHQSAQAQAQTGWVQNQGILPDMVWQDRDVYLQGPIWAKIPHTDGNFHPSPLMGGFGMKHPPPQILIKNTPVPADPPTAFNKDKLNSFITQYSTGQVSVEIEWELQKENSKRWNPEIQYTSNYYKSNNVEFAVNTEGVYSEPRPIGTRYLTRNL

SEQ ID NO: 3094 - protein, 736 aa, Artificial Sequence; identical to SEQ ID NO: 3074
  Synthetic polypeptide

SEQ ID NO: 3095 - protein, 736 aa, Artificial Sequence; identical to SEQ ID NO: 3078
  Synthetic polypeptide

SEQ ID NO: 3096 - protein, 736 aa, Artificial Sequence
  Synthetic polypeptide
MAADGYLPDWLEDNLSEGIREWWALKPGAPQPRANQQHQDNARGLVLPGYKYLGPGNGLDKGEPVNAADAAALEHDKAYDQQLKAGDNPYLKYNHADAEFQERLKEDTSFGGNLGRAVFQAKKRLLEPLGLVEEAAKTAPGKKRPVEQSPQEPDSSAGIGKSGAQPAKKRLNFGQTGDTESVPDPQPIGEPPAAPSGVGSLTMASGGGAPVADNNEGADGVGSSSGNWHCDSQWLGDRVITTSTRTWALPTYNNHLYKQISNSTSGGSSNDNAYFGYSTPWGYFDFNRFHCHFSPRDWQRLINNNWGFRPKRLNFKLFNIQVKEVTDNNGVKTIANNLTSTVQVFTDSDCQLPYVLGSAHEGCLPPFPADVFMIPQYGYLTLNDGSQAVGRSSFYCLEYFPSQMLRTGNNFQFSYEFENVPFHSSYAHSQSLDRLTNPLIDQYLYYLSKTINGSGQNQQTLKFSVAGPSNMAVQGRNYIPGPSYRQQRVSTTVTQNNNSEFAWPGASSWALNGRNSLMNPGPAMASHKEGEDRFFPLSGSLIFGKQGTGRDNVDADKVMITNEEEIKTTNPVATESHGQVATNHQSAQAQAQTGWVQNQGILPGMVWQDRDVYLQGPIWAKIPHTDGNFHPSPLMGGFGMKHPPPQILIKNTPVPADPPTAFNKDKLNSFITQYSTGQVSVEIEWELQKENSKRWNPEIQYTSNYYKSNNVEFAVNTEGVYSEPRPIGTRYLTRNL

SEQ ID NO: 3097 - protein, 736 aa, Artificial Sequence
  Synthetic polypeptide
MAADGYLPDWLEDNLSEGIREWWALKPGAPQPKANQQHQDNARGLVLPGYKYLGPGNGLDKGEPVNAADAAALEHDKAYDQQLKAGDNPYLKYNHADAEFQERLKEDTSFGGNLGRAVFQAKKRLLEPLGLVEEAAKTAPGKKRPVEQSPQEPDSSAGIGKSGAQPAKKRLNFGQTGDTESVPDPQPIGEPPAAPSGVGSLTMASGGGAPVADNNEGADGVGSSSGNWHCDSQWLGDRVITTSTRTWALPTYNNHLYKQISNSTSGGSSNDNAYFGYSTPWGYFDFNRFHCHFSPRDWQRLINNNWGFRPKRLNFKLFNIQVKEVTDNNGVKTIANNLTSTVQVFTDSDYQLPYVLGSAHEGCLPPFPADVFMIPQYGYLTLNDGSQAVGRSSFYCLEYFPSQMLRTGNNFQFSYEFENVPFHSSYAHSQSLDRLMNPPIDQYLYYLSKTINGSGQNQQTLKFSVAGPSNMAVQGRNYIPGPSYRQQRVSTTVTQNNNSEFAWPGASSWALNGRNSLMNPGPAMASHKEGEDRFFPLSGSLIFGKQGTGRDNVDADKVMITNEEEIKTTNPVATESYGQVATNHQSAQAQAQTGWVQNQGILPGMVWQDRDVYLQGPIWAKIPHTDGNFHPSPLMGGFGMKHPPPQILIKNTPVPADPPTAFNKDKLNSFITQYSTGQVSVEIEWELQKENSKRWNPEIQYTSNYYKSNNVEFAVNTEGVYGEPRPIGTRYLTRNL

SEQ ID NO: 3098 - protein, 736 aa, Artificial Sequence
  Synthetic polypeptide
MAADGYLPDWLEDNLSEGIREWWALKPGAPQPKANQQHQDNARGLVLPGYKYLGPGNGLDKGEPVNAADAAALEHDKAYDQQLKAGDNPYLKYNHADAEFQERLKEDTSFGGNLGRAVFQAKKRLLEPLGLVEEAAKTAPGKKRPVEQSPQEPDSSAGIGKSGAQPAKKRLNFGQTGDTESVPDPQPIGEPPAAPSGVGSLTMASGGGAPVADNNEGADGVGSSSGNWHCDSQWLGDRVITTSTRTWALPTYNNHLYKQISNSTSGGSSNDNAYFGYSTPWGYFDFNRFHCHFSPRDRQRLINNNWGFRPKRLNFKLFNIQVKEVTDNNGVKTIANNLTSTVQVFTDSDYQLPYVLGSAHEGCLPPFPADVFMIPQYGYLTLNDGSQAVGRSSFYCLEYFPSQMLRTGNNFQFSYEFENVPFHSSYAHSQSLDRLMNPLIDQYLYYLSKTINGSGQNQQTLKFSVAGPSNMAVQGRNYIPGPSYRQQRVSTTVTQNNNSEFAWPGASSWALNGRNSLMNPGPAMASHKEGEDRFFPLSGSLIFGKQGTGRDNVDADKVMITNEEEIKTTNPVATESYGQVATNHQSAQAQAQTGWVQNQGILPGMVWQDRDVYLQGPIWAKIPHTDGNFHPSPLMGGFGMKHPPPQILIKNTPVPADPPTAFNKDKLNSFITQYSTGQVSVEIEWELQKENSKRWNPEIQYTSNYYKSNNVEFAVNTEGVYSEPRPIGTRYLTRNL

SEQ ID NO: 3099 - protein, 736 aa, Artificial Sequence
  Synthetic polypeptide
MAADGYLPDWLEDNLSEGIREWWALKPGAPQPKANQQHQDNARGLVLPGYKYLGPGNGLDKGEPVNAADAAALEHDKAYDQQLKAGDNPYLKYNHADAEFQERLKEDTSFGGNLGRAVFQAKKRLLEPLGLVEEAAKTAPGKKRPVEQSPQEPDSSAGIGKSGAQPAKKRLNFGQTGDTESVPDPQPIGEPPAAPSGVGSLTMASGGGAPVADNNEGADGVGSSSGNWHCNSQWLGDRVITTSTRTWALPTYNNHLYKQISNSTSGGSSNDNAYFGYSTPWGYFDFNRFHCHFSPRDWQRLINNNWGFRPKRLNFKLFNIQVKEVTDNNGVKTIANNLTSTVQVFTDSDYQLPYVLGSAHEGCLPPFPADVFMIPQYGYLTLNDGSQAVGRSSFYCLEYFPSQMLRTGNNFQFSYEFENVPFHSSYAHSQSLDRLMNPLIDQYLYYLSKTINGSGQNQQTLKFSVAGPGNMAVQGRNYIPGPSYRQQRVSTTVTQNNNSEFAWPGASSWALNGRNSLMNPGPAMASHKEGEDRFFPLSGSLIFGKQGTGRDNVDADKVMITNEEEIKTTNPVATESYGQVATNHQSAQAQAQTGWVQNQGILPGMVWQDRDVYLQGPIWAKIPHTDGNFHPSPLMGGFGMKHPPPQILIKNTPVPADPPTAFNKDKLNSFITQYSTGQVSVEIEWELQKENSKRWNPEIQYTSNYYKSNNVEFAVNTEGVYSEPRPIGTRYLTRNL

SEQ ID NO: 3100 - protein, 736 aa, Artificial Sequence
  Synthetic polypeptide
MAADGYLPDWLEDNLSEGIREWWALKPGAPQPKANQQHQDNARGLVLPGYRYLGPGNGLDKGEPVNAADAAALEHDKAYDQQLKAGDNPYLKYNHADAEFQERLKEDTSFGGNLGRAVFQAKKRLLEPLGLVEEAAKTAPGKKRPVEQSPQEPDSSAGIGKSGAQPAKKRLNFGQTGDTESVPDPQPIGEPPAAPSGVGSLTMASGGGAPVADNNEGADGVGSSSGNWHCDSQWLGDRVITTSTRTWALPTYNNHLYKQISNSTSGGSSNDNAYFGYSTPWGYFDFNRFHCHFSPRDWQRLINNNWGFRPKRLNFKLFNIQVKEVTDNNGVKTVANNLTSTVQVFTDSDYQLPYVLGSAHEGCLPPFPADVFMIPQYGYLTLNDGSQAVGRSSFYCLEYFPSQMLRTGNNFQFSYEFENVPFHSSYAHSQSLDRLMNPLIDQYLYYLSKTINGSGQNQQTLKFSVAGPSNMAVQGRNYIPGPSYRQQRVSTTVTQNNNSEFAWPGASSWALNGRNSLMNPGPAMASHKEGEDRFFPLSGSLIFGKQGTGRDNVDADKVMITNEEEIKTTNPVATESYGQVATNHQSAQAQAQTGWVQNQGILPGMVWQDRDVYLQGPIWAKIPHTDGNFHPSPLMGGFGMKHPPPQILIKNTPVPADPPTAFNKDKLNSFITQYSTGQVSVEIEWELQKENSKRWNPEIQYTSNYYKSNNVEFAVNTEGVYSGPRPIGTRYLTRNL

SEQ ID NO: 3101 - protein, 736 aa, Artificial Sequence; identical to SEQ ID NO: 2511
  Synthetic polypeptide

SEQ ID NO: 3102 - protein, 736 aa, Artificial Sequence
  Synthetic polypeptide
MAADGYLPDWLEDNLSEGIREWWALKPGAPQPKANQQRQDNARGLVLPGYKYLGPGNGLDKGEPVNAADAAALEHDKAYDQQLKAGGNPCLKYNHADAEFQERLKEDTSFGGNLGRAVFQAKKRLLEPLGLVEEAAKTAPGKKRPVEQSPQEPDSSAGIGRSGAQPAKKRLNFGQTGDTESVPDPQPIGEPPAAPSGVGSLTMASGGGAPVADNNEGADGVGSSSGNWHCDSQWLGDRVITTSTRTWALPTYNNHLYKQISNSTSGGSSNDNAYFGYSTPWGYFDFNRFHCHFSPRDWQRLINNNWGFRPKRLNFKLFNIQVKEVTDNNGVKAIANNLTSTVQVFTDSDYQLPYVLGSAHEGCLPPFPADVFMIPQYGYLTLNDGSQAVGRSSFYCLEYFPSQMLRTGNNFQFSYEFENVPFHSSYAHSQSLDRLMNPLIDQYLYYLSKTIDGSGQNQQTLKFSVAGPSNMAVQGRNYIPGPSYRQQRVSTTVTQNNNSEFAWPGASSWALNGRNSLMDPGPAMASHKEGEDRFFPLSGSLIFGKQGTGRDNVDADKVMITNEEEIKTTNPVATESYGQVATNHQSAQAQAQTGWVQNQGILPGMVWQDRDVYLQGPIWAKIPHTGGNFHPSPLMGGFGMKHPPPQILIKNTPVPADPPTAFNKDKLNSFITQYSTGQVSVEIEWELQKENSKRWNPEIQYTSNYYKSNNVEFAVNTEGVYSEPRPIGTRYLTRNL

SEQ ID NO: 3103 - protein, 736 aa, Artificial Sequence
  Synthetic polypeptide
MAADGYLPDWLEDNLSEGIREWWALKPGAPQPKANQQHQDNARGLVLPGYKYLGPGNGLDKGEPVNAADAAALEHDKAYDQQLKAGDNPYLKYNHADAEFQERLKEDTSFGGNLGRAVFQAKKRLLEPLGLVEEAAKTAPGKKRPVEQSPQEPDSSAGIGKSGAQPAKKRLNFGQTGDTESVPDPQPIGEPPAAPSGVGSLTMASGGGAPVADNNEGADGVGSSSGNWHCDSQWLGDRVITTSTRTWALPTYNNHLYKQISNSTSGGSSNDNAYFGYSTPWGYFDFNRFHCHFSPRDWQRLINNNWGFRPKRLNFKLFNIQVKEVTDNNGVKTIANNLTSTVQVFTDSDYQLPYVLGSAHEGCLPPFPADVFMIPQYGYLTLNDGSQAVGRSSFYCLEYFPSQMLRTGNNFQFSYEFENVPFHSSYAHSQSLDRLMNPLIDQYLYYLSKTINGSGQNQQTLKFSVAGPSNMAVQGRNYIPGPSYRQQRVSTTVTQNNNSEFAWPGASSWALNGRNSLMNPGPAMASHKEGEDRFFPLSGSLIFGKQGTGRDNVDADKVMITNEEEIKTTNPVATESYGQVATNHQSAQAQAQTGWVQNQGILPGMVWQDRDVYLQGPIWAKIPHTDGNFHPSPLMGGFGMKHPPPQILIKNTPVPADPPTAFNKDKLNSFITQYSTGQVSVEIEWELQKENSKRWNPEIQYTSNYYKPNNVEFAVNTEGVYSEPRPIGTRYLTRNL

SEQ ID NO: 3104 - protein, 736 aa, Artificial Sequence
  Synthetic polypeptide
MAADGYLPDWLEDNLSEGIREWWALKPGAPQPKANQQHQDNARGLVLPGYKYLGPGNGLDKGEPVNAADAAALEHNKAYDQQLKAGDNPYLKCNHADAEFQERLKEDTSFGGNLGRAVFQAKKRPLEPLGLVEEAAKTAPGKKRPVEQSPQEPDSSAGIGKSGAQPAKKRLNFGQTGDTESVPDPQPIGEPPAAPSGVRSLTMASGGGAPVADNNEGADGVGSSSGNWHCDSQWLGDRVITTSTRTWALPTYNNHLYKQISNSTSGGSSNDNAYLGYSTPWGYFDFNRFHCHFSPRDWQRLINNNWGFRPKRLNFKLFNIQVKEVTDNNGVKTIANNLTSTVQVFTDSDYQLPYVLGSAHEGCLPPFPADVFMIPQYGYLTLNDGSQAVGRSSFYCLEYFPSQMLRTGNNFQFSYEFENVPFHSSYAHSQSLDRLMNPLIDQYLYYLSKTINGSGQNQQTLKFSVAGPSNMAVQGRNYIPGPSYRQQRVSTTVTQNNNSEFAWPGASSWALNGRNSLMNPGPTMASHKEGEDRFFPLSGSLIFGKQGTGRDNVDADKVMITNEEEIKTTNPVATESYGQVATNHQSAQAQAQTGWVQNQGILPGMVWQDRDVYLQGPIWAKIPHTDGNFHPSPLMGGFGMKHPPPQILIKNTPVPADPPTAFNKDKLNSFITQYSTGQVSVEIEWELQKENSKRWNPEIQYTSNYYKSNNVEFAVNTEGVYSEPRPIGTRYLTRNL

SEQ ID NO: 3105 - protein, 736 aa, Artificial Sequence
  Synthetic polypeptide
MAADGYLPDWLEDNLSEGIREWWALKPGAPQPKANQQHQDNARGLVLPGYKYLGPGNGLDKGEPVNAADAAALVHDKAYDQQLKAGDNPYLKCNHADAEFQERLKEDTSFGGNLGRAVFQAKKRLLEPLGLVEEAAKTAPGKKRPVEQSPQEPDSSAGIGKSGAQPAKKRLNFGQTGDTESVPDPQPIGEPPAAPSGVGSLTMASGGGAPVADNNEGADGVGSSSGNWHCDSQWLGDRVITTSTRTWALPTYNNHLYKQISNSTSGGSSNDNAYLGYSTPWGYFDFNRFHCHFSPRDWQRLINNNWGFRPKRLNFKLFNIQVKEVTDNNGVKTIANNLTSTVQVFTDSDYQLPYVLGSAHEGCLPPFPADVFTIPQYGYLTLNDGSQAVGRSSFYCLEYFPSQMLRTGNNFQFSYEFENVPFHSSYAHSQSLDRLMNPLIDQYLYYLSKTINGSGQNQQTLKFSVAGPSNMAVQGRNYIPGPSYRQQRVSTTVTQNNNSEFAWPGASSWALNGRNSLMNPGPAMASHKEGEDRFFPLSGSLIFGKQGTGRDNVDADKVMITNEEEIKTTNPVATESYGQVATNHQSAQAQAQTGWVQNQGILPGMVWQDRDVYLQGPIWAKIPHTDGNFHPSPLMGGFGMKHPPPQILIKNTPVPADPPTAFNKDKLNSFITQYSTGQVSVEIEWELQKENSKRWNPEIQYTSNYYKSNNVEFAVNTEGVYSEPRPIGPRYLTRNF

SEQ ID NO: 3106 - protein, 736 aa, Artificial Sequence
  Synthetic polypeptide
MAADGYLPDWLEDNLSEGIREWWALKPGAPQPKANQQHQDNARGLVLPGYKYLGPGNGLDKGEPVNAADAAALEHNKAYDQQLKAGDNPYLKCNHADAEFQERLKEDTSFGGNLGRAVFQAKKRLLEPLGLVEEAAKTAPGKKRPVEQSPQEPDSSAGIGKSGAQPAKKRLNFGQTGDTESVPDPQPIGEPPAAPSGVRSLTMASGGGAPVADNNEGADGVGSSSGNWHCDSQWLGDRVITTSTRTWALPTYNNHLYKQISNSTSGGSSNDNAYLGYSTPWGYFDFNRFHCHFSPRDWQRLINNNWGFRPKRLNFKLFNIQVKEVTDNNGVKTIANNLTSTVQVFTDSDYQLPYVLGSAHEGCLPPFPADVFMIPQYGYLTLNDGSQAVGRSSFYCLEYFPSQMLRTGNNFQFSYEFENVPFHSSYAHSQSLDRLMNPLIDQYLYYLSKTINGSGQNQQTLKFSVAGPSNMAVQGRNYIPGPSYRQQRVSTTVTQNNNSEFAWPGASSWALNGRNSLMNPGPAMASHKEGEDRFFPLSGSLIFGKQGTGRDNVDADKVMITNEEEIKTTNPVATESYGQVATNHQSAQAQAQTGWVQNQGILPGMVWQDRDVYLQGPIWAKIPHTDGNFHPSPLMGGFGMKHPPPQILIKNTPVPADPPTAFNKDKLNSFITQYSTGQVSVEIEWELQKENSKRWNPEIQYTSNYYKSNNVEFAVNTEGVYSEPRPIGTRYLTRNL

SEQ ID NO: 3107 - protein, 736 aa, Artificial Sequence
  Synthetic polypeptide
MAADGYLPDWLEDNLSEGIREWWALKPGAPQPKANQQHQDNARGLVLPGYKYLGPGNGLDKGEPVNAADAAALEHDKAYDQQLKAGDNPYLKCNHADAEFQERLKEDTSFGGNLGRAVFQAKKRLLEPLGLVEEAAKTAPGKKRPVEQSPQEPDSSAGIGKSGAQPAKKRLNFGQTGDTESVPDPQPIGEPPAAPSGVGSLTMASGGGAPVADNNEGADGVGSSSGNWHCDSQWLGDRVITTSTRTWALPTYNNHLYKQISNSTSGGSSNDNAYLGYSTPWGYFDFNRFHCHFSPRDWQRLINNNWGFRPKRLNFELFNIQVKEVTDNNGVKTIANNLTSTVQVFTDSDYQLPYVLGSAHEGCLPPFPADVFMIPQYGYLTLNDGSQAVGRSSFYCLEYFPSQMLRTGNNFQSSYEFENVPFHSSYAHSQSLDRLMNPLIDQYLYYLSKTINGSGQNQQTLKFSVAGPSNMAVQGRNYIPGPSYRQQRASTTVTQNNNSEFAWPGASSWALNGRNSLMNPGPAMASHKEGEDRFFPLSGSLIFGKQGTGRDNVDADKVMITNEEEIKTTNPVATESYGQVATNHQSAQAQAQTGWVQNQGILPGMVWQDRDVYLQGPIWAKIPHTDGNFHPSPLMGGFGMKHPPPQILIKNTPVPADPPTAFNKDKLNSFITQYSTGQVSVEIEWELQKENSKRWNPEIQYTSNYYKSNNVEFAVNTEGVYSEPRPIGTRYLTRNL

SEQ ID NO: 3108 - protein, 736 aa, Artificial Sequence
  Synthetic polypeptide
MAADGYLPDWLEDNLSEGIREWWALKPGAPQPKANQQHQDNARGLVLPGYKYLGPGNGLDKGEPVNAADAAALEHDKAYDQQLKAGDNPYLKCNHADAEFQERLKEDTSFGGNLGRAVFQAKKRLLEPLGLVEEAAKTAPGKKRPVEQSPQEPDSSAGIGKSGAQPAKKRLNFGQTGDTESVPDPQPIGEPPAAPPGVGSLTMASGGGAPVADNNEGADGVGSSSGNWHCDSQWLGDRVITTSTRTWALPTYNNHLYKQISNSTSGGSSNDNAYLGYSTPWGYFDFNRFHCHFSPRDWQRLINNNWGFRPKRLNFKLFNIQVKEVTDNNGVKTIANNLTSTVQVFTDSDYQLPYVLGSAHEGCLPPFPADVFMIPQYGYLTLNDGSQAVGRSSFYCLEYFPSQMLRTGNNFQFSYEFENVPFHSSYAHSQSLDRLMNPLIDQYLYYLSKTISGSGQNQQTLKFSVAGPSNMAVQGRNYIPGPSYRQQRVSTTVTQNNSSEFAWPGASSWALNGRNSLMNPGPAMASHKEGEDRFFPLSGSLIFGKQGTGRDNVDADKVMITNEEEIKTTNPVATESYGQVATNHQSAQAQAQTGWVQNQGILSGMVWQDRDVYLQGPIWAKIPHTDGNFHPSPLMGGFGMKHPPPQILIKNTPVPADPPTAFNKDKLNSFITQYSTGQVSVEIEWELQKENSKRWNPEIQYTSNYYKSNNVEFAVNTEGVYSEPRPIGTRYLTRNL

SEQ ID NO: 3109 - protein, 736 aa, Artificial Sequence
  Synthetic polypeptide
MAADGYLPDWLEDNLSEGIREWWALKPGAPQPKANQQHQDNARGLVLPGYKYLGPGNGLDKGEPVNAADAAALEHDKAYDQQLKAGDNPYLKCNHADAEFQERLKEDTSFGGNLGRAVFQAKKRLLEPLGLVEEAAKTAPGKKRPVEQSPQEPDSSAGIGKSGAQPAKKRLNFGQTGDTESVPDPQPIGEPPAAPSGVGSLTMASGGGAPVADNNEGADGVGSSSGNWHCDSQWLGDRVITTSTRTWALPTYNNHLYKQISNSTSGGSSNDNAYLGYSTPWGYFDFNRFHCHFSPRDWQRLINNNWGFRPKRLNFKLFNIQVKEVTDNNGVKTIANNLTSTVQVFTDSDYQLPYVLGSAHEGCLPPFPADVFMIPQYGYLTLNDGSQAVGRSSFYCLEYFPSQMLRTGNNFQFSYEFENVPFHSSYAHSQSLDRLMNPLIDQYLYYLSKTINGSGQNQQTLKFSVAGPSNMAVQGRNYIPGPSYRQQRVSTTVTQNNNSEFAWPGASSWALNGRNSLMNPGPAMASHKEGEDRFFPLSGSLIFGKQGTGRDNVDADKVMITNEEEIKTTNPVATESYGQVATNHQSAQAQAQTGWVQNQGILPGMVWQDRDVYLQGPIWAKIPHTDGNFHPSPLMGGFGMKHPPPQILIKNTPVPADPPTAFNKDKLNSFITQYSTGQVSVEIEWELQKENSKRWNPEIQYTSNYYKSNNVEFAVNTEGVYSEPRPIGTRYLTRNL

SEQ ID NO: 3110 - protein, 736 aa, Artificial Sequence; identical to SEQ ID NO: 3109
  Synthetic polypeptide

SEQ ID NO: 3111 - protein, 736 aa, Artificial Sequence
  Synthetic polypeptide
MAADGYLPDWLEDNLSEGIREWWALKPGAPQPKANQQHQDNARGLVLPGYKYLGPGNGLDKGEPVNAADAAALEHDKAYDQQLKAGDNPYLKCNHADAEFQERLKEDTSFGGNLGRAVFQAKKRLLEPLGLVEEAAKTAPGKKRPVEQSPQEPDSSAGIGKSGAQPAKKRLNFGQTGDTESVPDPQPIGEPPAAPSGVGSLTMASGGGAPVADNNEGADGVGSSSGNWHCDSQWLGDRVITTSTRTWALPTYNNHLYKQISNSTSGGSSNDNAYLDYSTPWGYFDFNRFHCHFSPRDWQRLINNNWGFRPKRLNFKLFNIQVKEVTDNNGVKTIANNLTSTVQVFTDSDYQLPYVLGSAHEGCLPPFPADVFMIPQYGYLTLNDGSQAVGRSSFYCLEYFPSQMLRTGNNFQFSYEFENVPFHSSYAHSQSLDRLMNPLIDQYLYYLSKTINGSGQNQQTLKFSVAGPSNMAVQGRNYIPGPSYRQQRVSTTVTQNNNSEFAWPGASSWALNGRNSLMNPGPAMASHKEGEDRFFPLSGSLIFGKQGTGRDNVDADKVMITNEEEIKTTNPVATESYGQVATNHQSAQAQAQTGWVQNQGILPGMVWQGRDVYLQGPIWAKIPHTDGNFHPSPLMGGFGMKHPPPQILIKNTPVPADPPTAFNKDKLNSFITQYSTGQVSVEIEWELQKENSKRWNPEIQYTSNYYKSNNVEFAVNTEGVYSEPRPIGTRYLTRNL

SEQ ID NO: 3112 - protein, 736 aa, Artificial Sequence; identical to SEQ ID NO: 3109
  Synthetic polypeptide

SEQ ID NO: 3113 - protein, 736 aa, Artificial Sequence
  Synthetic polypeptide
MAADGYPPDWLEDNLSEGIREWWALKPGAPQPKANQQHQDNARGLVLPGYKYLGPGNGLDKGEPVNAADAAALEHDKAYDQQLKAGDNPHLKYNHADAEFQERLKEDTSFGGNLGRAVFQAKKRLLEPLGLVEEAAKTAPGKKRPVEQSPQEPDSSAGIGKSGAQPAKKRLNFGQTGDTESVPDPQPIGEPPAAPSGVGSLTMASGGGAPVADNNEGADGVGSSSGNWHCDSQWLGDRVITTSTRTWALPTYNNHLYKQISNSTSGGSSNDNAYFGYSTPWGYFDFNRFHCHFSPRDWQRLINNNWGFRPKRLNFKLFNIQVKEVTDNNGVKTIANNLTSTVQVFTDSDYQLPYVLGSAHEGCLPPFPADVFMIPQYGYLTLNDGSQAVGRSSFYCLEYFPSQMLRTGNNFQFSYEFENVPFHSSYAHSQSLDRLMNPLIDQYLYYLSKTINGSGQNQQTLKFSVAGPSNMAVQGRNYIPGPSYRQQRVSTTVTQNNNSEFAWPGASSWALNGRNSLMNPGPAMASHKEGEDRFFPLSGSLIFGKQGTGRDNVDADKVMITNEEEIKTTNPVATESYGQVATNHQSAQAQAQTGWVQNQGILPGMVWQDRDVYLQGPIWAKIPHTDGNFHPSPLMGGFGVKHPPPQILIKNTPVPADPPTAFNKDRLNSFITQYSTGQVSVEIEWELQKENSKRWNPEIQYTSNYYKSNNVEFAVNTEGVYSEPRPIGTRYLTRNL

SEQ ID NO: 3114 - protein, 736 aa, Artificial Sequence
  Synthetic polypeptide
MAADGYLPDWLEDNLSEGIREWWALKPGAPQPKANQQHQDNARGLVLPGYKYLGPGNGLDKGEPVNAADAAALEHDKAYDQQLKAGDNPYLKYNHADAEFQERLKEDTSFGGNLGRAVFQAKKRLLEPLGLVEEAAKTAPGKKRPVEQSPQEPDSSAGIGKSGAQPAKKRLNFGQTGDTESVPDPQPIGEPPAAPSGVGSLTMASGGGAPVADNNEGADGVGSSSGNWHCDSQWLGDRVITTSTRTWALPTYNNHLYKQISNSTSGGSSNDNAYFGYSTPWGYFDFNRFHCHFSPRDWQRLINNNWGFRPKRLNFKLFNIQVKEVTDNNGVKTIANNLTSTVQVFTDSDYQLPYVLGSAHEGCLPPFPADVFMIPQYGYLTLNDGSQAVGRSSFYCLEYFPSQMLRTGNNFQFSYEFENVPFHSSYAHSQSLDRLMNPLIDQYLYYLSKTINGSGQNQQTLKFSVAGPSNMAVQGRNYIPGPSYRQQRVSTTVTQNNNSEFAWPGASSWALNGRNSLMNPGPAMASHKEGEDRFFPLSGSLIFGKQGTGRDNVDADKVMITNEEEIKTTNPVATESYGQVATNHQSAQAQAQTGWVQNQGILPGMVWQDRDVYLQGPIWAKIPHTDGNFHPSPLMGGFGVKHPPPQILIKNTPVPADPPTAFNKDKLNSFITQYSTGQVSVEIEWELQKENSKRWNPEIQYTSNYYKSNNVEFAVNTEGVYSEPRPIGTRYLTRNL

SEQ ID NO: 3115 - protein, 736 aa, Artificial Sequence
  Synthetic polypeptide
MAADGYLPDWLEDNLSEGIREWWALKPGAPQPKANQQHQDNARGLVLPGYKYLGPGNGLDKGEPVNAADAAALEHDKAYDQQLKAGDNPYLKYNHADAEFQERLKEDTSFGGNLGRAVFQAKKRLLEPLGLVEEAAKTAPGKKRPVEQSPQEPDSSAGIGKSGAQPAKKRLNFGQTGDTESVPDPQPIGEPPAAPSGVGSLTMASGGGAPVADNNEGADGVGSSSGNWHCDSQWLGDRVITTSTRTWALPTYNNHLYKQISNSTSGGSSNDNAYFGYSTPWGYFDFNRFHCHFSPRDWQRLTNNNWGFRPKRLNFKLFNIQVKEVTDNNGVKTIANNLTSTVQVFTDSDYQLPYVLGSAHEGCLPPFPADVFMIPQYGYLTLNDGSQAVGRSSFYCLEYIPSQMLRTGNNFQFSYEFENVPFHSSYAHSQSLDRLMNPLIDQYLYYLSKTINGSGQNQQTLKFSVAGPSNMAVQGRNYIPGPSYRQQRVSTTVTQNNNSEFAWPGASSWALNGRNSLMNPGPAMASHKEGEDRFFPLSGSLIFGKQGTGRDNVDADKVMITNEEEIKTTNPVATESYGQVATNHQSAQAQAQTGWVQNQGILPGMVWQDRDVYLQGPIWAKIPHTDGNFHPSPLMGGFGVKHPPPQILIKNTPVPADPPTAFNKDKLNSFITQYSTGQVSVEIEWELQKENSKRWNPEIQYTSNYYKSNNVEFAVNTEGVYSEPRPIGTRYLTRNL

SEQ ID NO: 3116 - protein, 736 aa, Artificial Sequence
  Synthetic polypeptide
MAADGYLPDWLEDNLSEGIREWWALKPGAPQPKANQQHQDNARGLVLPGYKYLGPGNGLDKGEPVNAADAAALEHDKAYDQQLKAGDNPYLKYNHADAEFQERLKEDTSFGGNLGRAVFQAKKRLLEPLGLVEEAAKTAPGKKRPVEQSPQEPDSSAGIGKSGAQPAKKRLNFGQTGDTESVPDPQPIGEPPAAPSGVGSLTMASGGGAPVADNNEGADGVGSSSGNWHCDSQWLGDRVITTSTRTWALPTYNNHLYKQISNSTSGGSSNDNAYFGYSTPWGYFDFNRFHCHFSPRDWQRLINNNWGFRPKRLNFKLFNIQVKEVTDNNGVKTIANNLTSTVQVFTDSDYQLPYVLGSAHEGCLPPFPADVFMIPQYGYLTLNDGSQAVGRSSFYCLEYFPSQMLRTGNNFQFSYEFENVPFHSSYAHSQSLDRLMNPLIDQYLYYLSKTINGSGQNQQTLKFSVAGPSNMAVQGRNYIPGPSYRQQRVSTTVTQNNNSEFAWPGASSWALNGRNSLMNPGPAMASHKEGEDRFFPLSGSLISGKQGTGRDNVDANKVMITNEEEIKTTNPVATESYGQVATNHQSAQAQAQTGWVQNQGILPGMVWQDRDVYLQGPIWAKIPHTDGNFHPSPLMGGFEMKHPPPQILIKNTPVPADPPTAFNKDKLNSFITQYSTGQVSVEIEWELQKENSKRWNPEIQYTSNYYKSNNVEFAVNTEGVYSEPRPIGTRYLTRNL

SEQ ID NO: 3117 - protein, 736 aa, Artificial Sequence
  Synthetic polypeptide
MAADGYLPDWLEDNLSEGIREWWALKPGAPQPKANQQHQDNARGLVLPGYKYLGPGNGLDKGEPVNAADAAALEHDKAYDQQLKAGDNPYLKYNHADAEFQERLKEDTSFGGNLGRAVFQAKKRLLEPLGLVEEAAKTAPGKKRPVEQSPQEPDSSAGIGKSGAQPAKKRLNFGQTGDTESVPDPQPIGEPPAAPSGVGSLTIASGGGAPVADNNEGADGVGSSSGNWHCDSQWLGDRVITTSTRTWALPTYNNHLYKRISNSTSGGSSNDNAYFGYSTPWGYFDFNRFHCHFSPRDWQRLINNNWGFRPKRLNFKLFNIRVKEVTDNNGVKTITNNLTSTVQVFTDSDYQLPYVLGSAHEGCLPPFPADVFMIPQYGYLTLNDGSQAVGRSSFYCLEYFPSQMLRTGNNFQFSYEFENVPFHSSYAHSQSLDRLMNPLIDQYLYYLSKTINGSGQNQQTLKFSVAGPSNMAVQGRNYIPGPSYRQQRVSTTVTRNNNSEFAWPGASSWALNGRNSLMNPGPAMASHKEGEDRFFPLSGSLIFGKQGTGRDNVDADKVMITNEEEIKTTNPVATESYGQVATNHQSAQAQAQTGWVQNQGILPGMVWQDRDVYLQGPIWAKIPHTDGNFHPSPLMGGFGVKHPPPQILIKNTPVPADPPTAFNKDKLNSFITQYSTGQVSVEIEWELQKENSKRWNPEIQYTSNYYKSNNVEFAVNTEGVYSEPRPIGTRYLTRNL

SEQ ID NO: 3118 - protein, 736 aa, Artificial Sequence
  Synthetic polypeptide
MAADGYLPDWLEDNLSEGIREWWALKPGAPQPKANQQHQDNARGLVLPGYKYLGPGNGLDKGEPVNAADAAALEHDKAYDQQLKAGDNPYLKYNHADAEFQERLKEDTSFGGNLGRAVFQAKKRLLEPLGLVEEAAKTAPGKKRPVEQSPQEPDSSAGIGKSGAQPAKKRLNFGQTGDTEPVPDPQPIGEPPAAPSGVGSLTMASGGGAPVADNNEGADGVGSSSGNWHCDSQWLGDRVITTSTRTWALPTYNNHLYKQISNSTSGGSSNDNAYFGYSTPWGYFDFNRFHCHFSPRDWQRLINNNWGFRPKRLNFKLFNIQVKEVTDNNGVKTIANNLTSTVQVFTDSDYQLPYVLGSAHEGCLPPFPAGVFMIPQYGYLTLNDGSQAVGRSSFYCLEYFPSQMLRTGNNFQFSYEFENVPFHSSYAHSQSLDRLMNPLIDQYLYYLSKTINGSGQNQQTLKFSVAGPSNMAVQGRNYIPGPSYRQQRVSTTATQNNNSEFAWPGASSWALNGRNSLMNPGPAMASHKEGEDRFFPLSGSLIFGKQGTGRDNVDADKVMITNEEEIKTTNPVATESYGQVATNHQSAQAQAQTGWVQNQGILPGMVWQDRDVYLQGPIWAKIPHTDGNFHPSPLMGGFGMKHPPPQILIKNTPVPADPPTAFNKDKLNSFITQYSTGQVSVEIEWELQKENSKRWNPEIQYTSNYYKSNNVEFAVNTEGVYSEPRPIGTRYLTRNL

SEQ ID NO: 3119 - protein, 736 aa, Artificial Sequence
  Synthetic polypeptide
MAADGYLPDWLEDNLSEGIREWWALKPGAPQPKANQQHQDNARGLVLPGYKYLGPGNGLDKGEPVNAADAAALEHDKAYDQQLKAGDNPYLKYNHADAGFQERLKEDTSFGGNLGRAVFQAKKRLLEPLGLVEEAAKTAPGKKRPVEQSPQEPDSSAGIGKSGAQPAKKRLNFGQTGDTESVPVPQPIGEPPAAPSGVGSLTMASGGGAPVADNNEGADGVGSSSGNWHCDSQWLGDRVITTSTRTWALPTYNNHLYKQISNSTSGGSSNDNAYFGYSTPWGYFDFNRFHCHFSPRDWQRLINNNWGFRPKRLNFKLFNIQVKEVTDNNGVKTIANNLTSTVQVFTDSDYQLPYVLGSAHEGCLPPFPADVFMIPQYGYLTLNDGSQAVGRSSFYCLEYFPSQMLRTGNNFQFSYEFENVPFHSSYAHSQSLDRLMNPLIDQYLYYLSKTINGSGQNQQTLKFSVAGPSNMAVQGRNYIPGPSYRQQRVSTTVTQNNNSEFAWPGASSWALNGRNSLMNPGPAMASHKEGEDRFFPLSGSLIFGKQGAGRDNVDADKVMITNEEEIKTTNPVATESYGQVATNHQSAQAQAQTGWVQNQGILPGMVWQDRDVYLQGPIWAKIPHTDGNFHPSPLMGGFGMKHPPPQILIKNTPVPADPPTAFNKDKLNSFITQYSTGQVSVEIEWELQKENSKRWNPEIQYTSNYYKSNNVEFAVNTEGVYSEPRPIGTRYLTRNL

SEQ ID NO: 3120 - protein, 736 aa, Artificial Sequence
  Synthetic polypeptide
  MOD_RES (126)..(126): Any naturally occurring amino acid
MAADGYLPDWLEDNLSEGIRERWALKPGAPQPKANQQHQDNARGLVLPGYKYLGPGNGLDKGEPVNAADAAALEHDKAYDQQLKAGDNPYLKYNHADAEFQERLKEDTSFGGNLGRAVFQAKKRLXEPLGLVEEAAKTAPGKKRPVEQSPQEPDSSAGIGKSGAQPAKKRLNFGQTGDTESVPDPQPIGEPPAAPSGVGSLTMASGGGAPVADNNEGADGVGSSSGNWHCDSQWLGDRVITTSTRTWALPTYNNHLYKQISNSTSGGSSNDNAYFGYSTPWGYFDFNRFHCHFSPRDWQRLINNNWGFRPKRLNFKLFNIQVKEVTDNNGVKTIANNLTSTVQVFTDSDYQLPYVLGSAHEGCLPPFPADVFMIPQYGYLTLNDGSQAVGRSSFYCLEYFPSQMLRTGNNFQFSYEFENVPFHSSYAHSQSPDRLMNPLIDQYLYYLSKTINGSGQNQQTLKFSVAGPSNMAVQGRNYIPGPSYRQQRVSTTVTQNNNSEFAWPGASSWALNGRNSLMNPGPAMASHKEGEDRFFPLSGSLIFGKQGTGRDNVDADKVMITNEEEIKTTNPVATESYGQVATNHQSAQAQAQTGWVQNQGILPGMVWQDRDVYLQGPIWAKIPHTDGNFHPSPLMGGFGVKHPPPQILIKNTPVPADPPTAFNKDKLNSFITQYSTGQVSVEIEWELQKENSKRWNPEIQYTSNYYKSNNVEFAVNTEGVYSEPRPIGTRYLTRNL

SEQ ID NO: 3121 - protein, 736 aa, Artificial Sequence
  Synthetic polypeptide
MAADGYLPDWLEDNLSEGIREWWALKPGAPQPKANQQHQDNARGLVLPGYKYLGPGNGLDKGEPVNAADAAALEHDKAYDQQLKAGDNPYLKYNHADAEFQERLKEDTSFGGNLGRAVFQAKKRLLEPLGLVEEAAKTAPGKKRPVEQSPQEPDSSAGIGKSGAQPAKKRLNFGQTGDTESVPDPQPIGEPPAAPSGVGSLTMASGGGAPVADNNEGADGVGSSSGNWHCDSQWLGDRVITTSTRTWALPTYNNHLYKQISNSTSGGSSNDNAYLGYSTPWGYFDFNRFHCHFSPRDWQRLINNNWGFRPKRLNFKLFNIQVKEVTDNNGVKTIANNLTSTVQVFTDSDYQLPYVLGSAHEGCLPPFPADVFMIPQYGYLTLNDGSQAVGRSSFYCLEYFPSQMLRTGNNFQFSYEFENVPFHSSYAHSQSLDRLMNPLIDQYLYYLSKTINGSGQNQQTLKFSVAGPSNMAVQGRNYIPGPSYRQQRVSTTVTQNNNSEFAWPGASSWALNGRNSLMNPGPAMASHKEGEDRFFPLSGSLIFGKQGTGRDNVDADKVMITNEEEIKTTNPVATESYGQVATNHQSAQAQAQTGWVQNQGILPGMVWQDRDVYLQGPIWAKIPHTDGNFHPSPLMGGFGMKHPPPQILIKNTPVPADPPTAFNKDKLNSFITQYSTGQVSVEIEWELQKENSKRWNPEIQYTSNYYKSNNVEFAVNTEGVYSEPRPIGTRYLTRNL

SEQ ID NO: 3122 - protein, 736 aa, Artificial Sequence
  Synthetic polypeptide
MAADGYLPDWLEDNLSEGIREWWALKPGAPQPKANQQHQDNARGLVLPGYKYLGPGNGLDKGEPVNAADAAALEHDKAYDQQLKAGDNPYLKYNHADAEFQERLKEDTSFGGNLGRAVFQAKKRLLEPLGLVEEAAKTAPGKKRPVEQSPQEPDSSAGIGKSGAQPAKKRLNFGQTGDTESVPDPQPIGEPPAAPSGVGSLTMASGGGAPVADNNEGADGVGSSSGNWHCDSQWLGDRVITTSTRTWALPTYNNHLYKQISNSTSGGSSNDNAYFGYSTPWGYFDFNRFHCHFSPRDWQRLINNNWGFRPKRLNFKLFNIQVKEVTDNNGVKTIANNLTSTVQVFTDSDYQLPYVLGSAHEGCLPPFPADVFMIPQYGYLTLNDGSQAVGRSSFYCLEYFPSQMLRTGNNFQFSYEFENVPFHSSYAHSQSLDRLMNPLIDQYLYYLSKTINGSGQNQQTLKFSVAGPSNMAVQGRNYIPGPSYRQQRVSTTVTQNNNSEFAWPGASSWALNGRNSLMNPGPAMASHKEGEDRFFPLSGSLIFGKQGTGRDNVDADKVMITNEEEIKTTNPVATESYGQVATNHQSAQAQAQTGWVQNQGILPGMVWQDRDVYLQGPIWAKIPHTDGNFHPSPLMGGFGMKHPPPQILIKNTPVPADPPTAFNKDKLDSFITQYSTGQVSVEIEWELQKENSKRWNPVIQYTSNYYKSNNVEFAVNTEGVYSEPRPIGTRYLTRNL

SEQ ID NO: 3123 - protein, 736 aa, Artificial Sequence
  Synthetic polypeptide
MAADGYLPDWLEDNLSEGIREWWDLKPGAPKPKANQQKQDDGRGLVLPGYKYLGPFNGLDKGEPVNAADAAALEHDKAYDQQLKAGDNPYLRYNHADAEFQERLQEDTSFGGNLGRAVFQAKKRVLEPLGLVEEGAKTAPGKKRPVEQSPQEPDSSSGIGKTGQQPAKKRLNFGQTGDSESVPDPQPLGEPPATPAAVGPTTMASGGGAPMADNNEGVDGVGNASGNWHCDSTWLGDRVITTSTRTWALPTYNNHLYKQISSASTGASNDNHYFGYSTPWGYFDFNRFHCHFSPRDWQRLINNNWGFRPKRLNFKLFNIQVKEVTTNDGVTTIANNLTSTVQVFSDSEYQLPYVLGSAHQGCLPPFPADVFMIPQYGYLTLNNGSQAVGRSSFYCLEYFPSQMLRTGNNFTFSYTFEEVPFHSSYAHSQSLDRLMNPLIDQYLYYLNRTQNQSGSAQNKDLLFSRGSPAGMSVQPKNWLPGPCYRQQRVSKTKTDNNNSNFTWTGASKYNLNGRESIINPGTAMASHKDDEDKFFPMSGVMIFGKESAGASNTALDNVMITDEEEIKATNPVATERFGTVAVNFQSSSTDPATGDVHAMGALPGMVWQDRDVYLQGPIWAKIPHTDGHFHPSPLMGGFGLKNPPPQILIKNTPVPANPPAEFSATKLASFITQYSTGQVSVEIEWELQKENSKRWNPEVQYTSNYAKSANVDFTVDNNGLYTEPRPIGTRYLTRPL

SEQ ID NO: 3124 - protein, 736 aa, Artificial Sequence
  Synthetic polypeptide
MAADGYLPDWLEDNLSEGIREWWDLKPGAPKPKANQQKQDDGRGLVLPGYKYLGPFNGLDKGEPVNAADAAALEHDKAYDQQLKAGDNPYLRYNHADAEFQERLQEDTSFGGNLGRAVFQAKKRVLEPLGLVEEGAKTAPGKRRPVEQSPQEPDSSSGIGKTGQQPAKKRLNFGQTGDSESVPDPQPLGEPPATPAAVGPTTMASGGGAPMADNNEGADGVGNASGNWHCDSTWLGDRVITTSTRTWALPTYNNHLYKQISSASTGASNDNHYFGYSTPWGYFDFNRFHCHFSPRDWQRLINNNWGFRPKRLNFKLFNIQVKEVTTNDGVTTIANNLTSTVQVFSDSEYQLPYVLGSAHQGCLPPFPADVFMIPQYGYLTLNNGSQAVGRSSFYCLEYFPSQMLRTGNNFTFSYTFEEVPFHSSYAHSQSLDRLMNPLIDQYLYYLNRTQNQSGSAQNKDLLFSRGSPAGMSVQPKNWLPGPCYRQQRVSKTKTDNNNSNFTWTGASKYNLNGRESIINPGTAMASHKDDEDKFFPMSGVMIFGKESAGASNTALDNVMITDEEEIKATNPVATERFGTVAVNFQSSSTDPATGDVHAMGALPGMVWQDRDVYLQGPIWAKIPHTDGHFHPSPLMGGFGLKNPPPQILIKNTPVPANPPAEFSATKFASFITQYSTGQVSVEIEWELQKENSKRWNPEVQYTSNYAKSANVDFTVDNNGLYTEPRPIGTRYLTRPL

SEQ ID NO: 3125 - protein, 736 aa, Artificial Sequence
  Synthetic polypeptide
MAADGYLPDWLEDNLSEGIREWWDLKPGAPKPKANQQKQDDGRGLVLPGYKYLGPFNGLDKGEPVNAADAAALEHDKAYDQQLKAGDNPYPRYNHADAEFQERLQEDTSFGGNLGRAVFQAKKRVLEPLGLVGEGAKTAPGKKRPVEQSPQEPDSSSGIGKTGQQPAKKRLNFGQTGDSESVPDPQPLGEPPATPAAVGPTTMASGGGAPMADNNEGADGVGNASGNWHCDSTWLGDRVITTSTRTWALPTYNNHLYKQISSASTGASNDNHYFGYSTPWGYFDFNRFHCHFSPRDWQRLINNNWGFRPKRLNFKLFNIQVKEVTTNDGVTTIANNLTSTVQVFSDSEYQLPYVLGSAHQGCLPPFPADVFMIPQYGYLTLNNGSQAVGRSSFYCLEYFPSQMLRTGNNFTFSYTFEEVPFHSSYAHSQSLDRLMNPPIDQYLYYLNRTQNQSGSAQNKDLLFSRGSPAGMSVQPKNWLPGPCYRQQRVSKTKTDNNNSNFTWTGASKYNLNGRESIINPGTAMASHKDDEDKFFPMSGVMIFGKESAGASNTALDNVMITDEEEIKATNPVATERFGTVAVNFQSSSTDPATGDVHAMGALPGMVWQDRDVYLQGPIWAKIPHTDGHFHPSPLMGGFGLKNPPPQILIKNTPVPANPPAEFSATKFASFITQYSTGQVSVEIEWELQKENSKRWNPEVQYTSNYAKSANVDFTVDNNGLYTEPRPIGTRYLTRPL

SEQ ID NO: 3126 - protein, 736 aa, Artificial Sequence
  Synthetic polypeptide
MAADGYLPDWLEDNLSEGIREWWDLKPGAPKPKANQQKQDDGRGLVLPGYKYLGPFNGLDKGEPVNAADAAALEHDKAYDQQLKAGDNPYLRYNHADAEFQERLQEDTSFGGNLGRAVFQAKKRVLEPLGLVEEGAKTAPGKKRPVEQSPQEPDSSSGIGKTGQQPAKKRLNFGQTGDSESVPDPRPLGEPPATPAAVGPTTMASGGGAPMADNNEGADGVGNASGNWHCDSTWLGDRVITTSTRTWALPTYNNHLYKQISSASTGASNDNHYFGYSTPWGYFDFNRFHCHFSPRDWQRLINNNWGFRPKRLNFKLFNIQVKEVTTNDGVTTIANNLTSTVQVFSDSEYQLPYVLGSAHQGCLPPFPADVFMIPQYGYLTLNNGSQAVGRSSFYCLEYFPSQMLRTGNNFTFSYTFEEVPFHSSYAHSQSLDRLMNPLIDQYLYYLNRTQNQSGSAQNKDLLFSRGPPAGMSVQPKNWLPGPCYRQQRVSKTKTDNNNSNFTWTGASKYNLNGRESIINPGTAMASHKDDEDKFFPMSGVMIFGKESAGASNTALDNVMITDEEEIKATNPVATERFGTVAVNFQSSSTDPATGDVHAMGALPGMVWQDRDVYLQGPIWAKIPHTDGHFHPSPLMGGFGLKNPPPQILIKNTPVPANPPAEFSATKFASFITQYSTGQVSVEIEWELQKENSKRWNPEVQYTSNYAKSANVDFTVDNNGLYTEPRPIGTRYLTRPL

SEQ ID NO: 3127 - protein, 736 aa, Artificial Sequence
  Synthetic polypeptide
MAADGYLPDWLEDNLSEGIREWWDLKPGAPKPKANQQKQDDGRGLVLPGYKYLGPFNGLDKGEPVNAADAAALEHDKAYDQQLKAGDNPYLRYNHADAEFQERLQEDTSFGGNLGRAVFQAKKRVLEPLGLVEEGAKTAPGKKRPVEQSPQEPDSSSGIGKTGQQPAKKRLNFGQTGGSESVPDPQPLGEPPATPAAVGPTTMASGGGAPMADNNEGADGVGNASGNWHCDSTWLGDRVITTSTRTWALPTYNNHLYKQISSASTGASNDNHYFGYSTPWGYFDFNRFHCHFSPRDWQRLINNNWGFRPKRLNFKLFNIQVKEVTTNDGVTTIANNLTSTVQVFSDSEYQLPYVLGSAHQGCLPPFPADVFMIPQYGYLTLNNGSQAVGRSSFYCLEYFPSQMLRTGNNFTFSYTFEEVPFHSSYAHSQSLDRLMNPPIDQYLYYLNRTQNQSGSAQNKDLLFSRGSPAGMSVQPKNWLPGPCYRQQRVSKTKTDNNNSNFTWTGASKYNLNGRESIINPGTAMASHKDDEDKFFPMSGVMIFGKESAGASNTALDNVMITDEEEIKATNPVATERFGTVAVNFQSSSTDPATGDVHAMGALPGMVWQDRDVYLQGPIWAKIPHTDGHFHPSPLMGGFGLKNPPPQILIKNTPVPANPPAEFSATKFASFITQYSTGQVSVEIEWELQKENSKRWNPEVQYTSNYAKSANVDFTVDNNGLYTEPRPIGTRYLTRPL

SEQ ID NO: 3128 - protein, 736 aa, Artificial Sequence
  Synthetic polypeptide
MAADGYLPDWLEDNLSEGIREWWDLKPGAPKPKANQQKQDDGRGLVLPGYKYLGPFNGLDKGEPVNAADAAALEHDKAYDQQLKAGDNPYLRYNHADAEFQERLQEDTSFGGNLGRAVFQAKKRVLEPLGLVEEGAKTAPGKKRPVEQSPQEPDSSSGIGKTGQQPAKKRLNFGQTGDSESVPDPQPLGEPPATPAAVGPTTMASGGGAPMADNNEGADGVGNASGNWHCDSTWLGDRVITTSTRTWALPTYNNHLYKQISSASTGASNDNHYFGYSTPWGYFDFNRFHCHFSPRDWQRLINNNWGFRPKRLNFKLFNIQVKEVTTNDGVTTIANNLTSTVQVFSDSEYQLPYVLGSAHQGCLPPFPADVFMIPQYGYLTLNNGSQAVGRSSFYCLEYFPSQMLRTGNNFTFSYTFEEVPFHSSYAHSQSLDRLMNPLIDQYLYYLNRTQNQSGSAQNKDLLFSRGSPAGMSVQPKNWLPGPCYRQQRVSKTKTDNNNSNFTWTGASKYNLNGRESIINPGTAVASHKDDEDKFFPMSGVMIFGKESAGASNTALDNVMITDEEEIKATNPVATERFGTVAVNFQSSSTDPATGDVHAMGALPGMVWQDRDVYLQGPIWAKIPHTDGHFHPSPLMGGFGLKNPPPQILIKNTPVPANPPAEFSATKFASFITQYSTGQVSVEIEWELQKENSKRWNPEVQYTSNYAKSANVDFTVDNNGLYTEPRPIGTRYLTRPL

SEQ ID NO: 3129 - protein, 736 aa, Artificial Sequence
  Synthetic polypeptide
MAADGYLPDWLEDNLSEGIREWWDLKPGAPKPKANQQKQDDGRGLVLPGYKYLGPFNGLDKGEPVNAADAAALEHDKAYDQQLKAGDNPYLRYNHADAEFQERLQEDTSFGGNLGRAVFQAKKRVLEPLGLVEEGAKTAPGKKRPVEQSPQEPDSSSGIGKTGQQPAKKRLNFGQTGDSESVPDPQPLGEPPATPAAVGPTTMASGGGAPMADNNEGADGVGNASGNWHCDSTWLGDRVITTSTRTWALPTYNNHLYKQISSASTGASNDNHYFGYSTPWGYFDFNRFHCHFSPRDWQQLINNNWGFRPKRLNFKLFNIQVKEVTTNDGVTTIANNLTSTVQVFSDSEYQLPYVLGSAHQGCLPPFPADVFMIPQYGYLTLNNGSQAVGRSSFYCLEYFPSQMLRTGNNFTFSYTFEEVPFHSSYAHSQSLDRLMNPLIDQYLYYLNRTQNQSGSAQNKDLLFSRGSPAGMSVQPKNWLPGPCYRQQRVSKTKTDNNNSNFTWTGASKYNLNGRESIINPGTAMASHKDDEDKFFPMSGVMIFGKESAGASNTALDNVMITDEEEIKATNPVATERFGTVAVNFQSTSTDPATGDVHAMGALPGMVWQDRDVYLQGPIWAKIPHTDGHFHPSPLMGGFGLKNPPPQILIKNTPVPANPPAEFSATKFASFITQYSTGQVSVEIEWELQKENSKRWNPEVQYTSNYAKSADVDFTVDNNGLYTEPRPIGTRYLTRPL

SEQ ID NO: 3130 - protein, 736 aa, Artificial Sequence
  Synthetic polypeptide
MAADGYLPDWLEDNLSEGIREWWDLKPGAPKPKANQQKQDDGRGLVLPGYKYLGPFNGLDKGEPVNAADAAALEHDKAYDQQLKAGDNPYLRYNHADAEFQERLQEDTSFGGNLGRAVFQAKKRVLEPLGLVEEGAKTAPGKKRPVEQSPQEPDSSSGIGKTGQQPAKKRLNFGQTGDSESVPDPQPLGEPPATPAAVGPTTMASGGGAPMADNNEGADGVGNASGNWHCDSTWLGDRVITTSTRTWALPTYNNHLYKQISSASTGASNDNHYFGYSTPWGYFDFNRFHCHFSPRDWQRLINNNWGFRPKRLNFKLFNIQVKEVTTNDGVTTIANNLTSTVQVFSDSEYQPPYVLGSAHQGCLPPFPADVFMIPQYGHLTLNNGSQAVGRSSFYCLEYFPSQMLRTGNNFTFSYTFEEVPFHSSYAHSQSLDRLTNPLIDQYLYYLNRTQNQSGSAQNKDLLFSRGSPAGMSVQPKNWLPGPCYRQQRVSKTKTDNNNSNFTWTGASKYNLNGRESIINPGTAMASHKDDEDKFFPMSGVMIFGKESAGASNTALDNVMITDEEEIKATNPVATERFGTVAVNFQSSSTDPATGDVHAMGALPGMVWQDRDVYLQGPIWAKIPHTDGHFHPSPLMGGFGLKNPPPQILIKNTPVPANPPAEFSATKFASFITQYSTGQVSVEIEWELQKENSKRWNPEVQYTSNYAKSANVDFTVDNNGLYTEPRPIGTRYLTRPL

SEQ ID NO: 3131 - protein, 736 aa, Artificial Sequence
  Synthetic polypeptide
MAADGYLPDWLEDNLSEGIREWWDLKPGAPKPKANQQEQDDGRGLVLPGYKYLGPFNGLDKGEPVNAADAAALEHDKAYDQQLKAGDNPYLRYNHADAEFQERLQEDTSFGGNLGRAVFQAKKRVLEPLGLVEEGAKTAPGKKRPVEQSPQEPDSSSGIGKTGQQPAKKRLNFGQTGDSESVPDPQPLGEPPATPAAVGPTTMASGGGAPMADNNEGADGVGNASGNWHCDSTWLGDRVITTSTRTWALPTYNNHLYKQISSASTGASNDNHYFGYSTPWGYFDFNRFHCHFSPRDWQRLINNNWGFRPKRLNFKLFNIQVKEVTTNDGVTTIANNLTSTVQVFSDSEYQLPYVLGSAHQGCLPPFPADVFMIPQYGYLTLNNGSQAVGRSSFYCLEYFPSQMLRTGNNFTFSYTFEEVPFHSSYAHSQSLDRLMNPLIDQYLYYLNRTQNQSGSAQNKDLLFSRGSPAGMSVQPKNWLPGPCYRQQRVSKTKTDNNNSNFTWTGASKYNLNGRESIINPGTAMASHKDDEDKFFPMSGVMIFGKESAGASNTALDNVMITDEEEIKATNPVATERFGTVAVNFQSSSTDPATGDVHATGTLPGMVWQDRDVYLQGPIWAKIPHTDGHFHPSPLMGGFGLKNPPPQILIKTTPVPANPPAEFSATKFASFITQYSTGQVSVEIEWELQKENSKRWNPEVQYTSNYAKSANVDFTVDDNGLYTEPRPIGTRYLTRPL

SEQ ID NO: 3132 - protein, 736 aa, Artificial Sequence
  Synthetic polypeptide
MAADGYLPDWLEDNLSEGIREWWDLKPGAPKPKANQQKQDDGRGLVLPGYKYLGPFNGLDKGEPVNAADAAALEHDKAYDQQLKAGDNPYLRYNHADAEFQERLQEDTSFGGNLGRAVFQAKKRVLEPLGLVEEGAKTAPGKKRPVEQSLQEPDSSSGIGKTGQQPAKKRLNFGQTGDSESVPDPQPLGEPPATPAAVGPTTMASGGGAPMADNNEGADGVGNASGNWHCDSTWLGDRVITTSTRTWALPTYNNHLYKQISSASTGASNDNHYFGYSTPWGYFDFNRFHCHFSPRDWQRLINNNWGFRPKRLNFKLFNIQVKEVTTNDGVTTIANNLTSTVQVFSDSEYQLPYVLGSAHQGCLPPFPADVFMIPQYGYLTLNNGSQAVGRSSFYCLEYFPSQMLRTGNNFTFSYTFEEVPFHSSYAHSQSLDRLMNPLIDQYLYYLNRTQNQSGSAQNKDLLFSRGSPAGMSVQPKNWLPGPCYRQQRVSKTKTDNDNSNFTWTGASKYNLNGRESIINPGTAMASHKDDEDKFFPMSGVMIFGKESAGASNTALDNVMITDEEEIKATNPVATERFGTVAVNFQSSSTDPATGDVHAMGALPGMVWQDRDVYLQGPIWAKIPHTDGHFHPSPLMGGFGLKNPPPQILIKNTPVPANPPAEFSATKFASFITQYSTGQVSVEIEWELQKENSKRWNPEVQYTSNYAKSANVDFTVDNNGLYTEPRPIGTRYLTRPL

SEQ ID NO: 3133 - protein, 736 aa, Artificial Sequence
  Synthetic polypeptide
MAADGYLPDWLEDNLSEGIREWWDLKPGAPKPKANQQKQDDGRGLVLPGYKYLGPFNGLDKGEPVNAADAAALEHDKAYDQQLKAGDNPYLRYNHADAEFQERLQEDTSFGGNLGRAVFQAKKRVLEPLGLVEEGAKTAPGKKRPVEQSPQEPDSSSGIGKTGQQPAKKRLNFGQTGDSESVPDPQPLGEPPATPAAVGPTTMASGGGAPMADNNEGADGVGNASGNWHCDSTWLGDRVITTSTRTWALPTYNNHLYKQISSASTGASNDNHYFGYSTPWGYFDFNRFHCHFSPRDWQRLINNNWGFRPKRLNFKLFNIQVKEVTTNDGVTTIANNLTSTVQVFSDSEYQLPYVLGSAHQGCLPPFPADVFMIPQYGYLTLNNGSQAVGRSSFYCLEYFPSQMLRTGNNFTFSYTFEEAPFHSSYAHSQSLDRLMNPLIDQYLYYLNRTQNQSGSAQNKDLLFSRGSPAGMSVQPKNWLPGPCYRQQRVSKTKTDNNNSNFTWTGASKYNLNGRESIINPGTAMASHKDDEDKFFPMSGVMIFGKESAGASNTALDNVMITDEEEIKATNPVATERFGTVAVNFQSSSTDPATGDVHAMGALPGMVWQDRDVYLQGPIWAKIPHTDGHFHPSPLMGGFGLKNPPPQILIKNTPVPANPPAEFSATKFASFITQYSTGQVSVEIEWELQKENSKRWNPEVQYTSNYAKSANVDFTVDNNGLYTEPRPVGTRYLTRPL

SEQ ID NO: 3134 - protein, 736 aa, Artificial Sequence
  Synthetic polypeptide
MAADGYLPDWLEDNLSEGIREWWDLKPGAPKPKANQQKQDDGRGLVLPGYKYLGPFNGLDKGEPVNAADAAALEHDKAYDQQLKAGDNPYLRYNHADAEFQERLQENTSFGGNLGRAVFQAKKRVLEPLGLVEEGAKTAPGKKRPVEQSPQEPDSSSGIGKTGQQPAKKRLNFGQTGDSESVPDPQPLGEPPATPAAVGPTTMASGGGAPMADNNEGADGVGNASGNWHCDSTWLGDRVITTSTRTWALPTYNNHLYKQISSASTGASNDNHYFGYSTPWGYFDFNRFHCHFPPRDWQRLINNNWGFRPKRLNFKLFNIQVKEVTSNDGVTTIANNLTSTVQVFSDSEYQLPYVLGSAHQGCLPPFPADVFMIPQYGYLTLNNGSQAVGRSSFYCLEYFPSQMLRTGNNFTFSYTFEEVPFHSSYAHSQSLDRLMNPLIDQYLYYLNRTQNQSGSAQNKDLLFSRGSPAGMSVQPKNWLPGPCYRQQRVSKTKTDNNNSNFTWTGASKYNLNGRESIINPGTAMASHKDDEDKFFPMSGVMIFGKESAGASNTALDNVMITDEEEIKATNPVATERFGTVAVNFQSSSTDPATGDVHAMGALPGMVWQDRDVYLQGPIWAKIPHTDGHFHPSPLMGGFGLKNPPPQILIKNTPVPANPPAEFSATKFASFITQYSTGQVSVEIEWELQKENSKRWNPEVQYTSNYAKSANVDFTVDNNGLYTEPRPIGTRYLTRPL

SEQ ID NO: 3135 - protein, 736 aa, Artificial Sequence
  Synthetic polypeptide
MAADGYLPDWLEDNLSEGIREWWDLKPGAPKPKANQQKQDDGRGLVLPGYKYLGPFNGLDKGEPVNAADAAALEHDKAYDQQLKAGDNPYLRYNHADAEFQERLQEDTSFGGNLGRAVFQAKKRVLEPLGLVEEGAKTAPGKKRPVEQSPQEPDSSSGIGKTGQQPAKKRLNFGQTGDSESVPDPQPLGEPPATPAAVGPTTMASGGGAPMADNNEGADGVGNASGNWHCDSTWLGDRVITTSTRTWALPTYNNHLYKQISSASTGASNDNHYFGYSTPWGYFDFNRFHCHFSPRDWQRLINNNWGFRPKRLNFKLFNIQVKEVTTNDGVTTIANNLTSTVQVFSDSEYQLPYVLGSAHQGCLPPFPADVFMIPQYGYLTLNNGSQAVGRSSFYCLEYFPSQMLRTGNNFTFSYTFEEVPFHSSYAHSQSLDRLMNPLIDQYLYYLNRTQNQSGSAQNKDLLFSRGSPAGTSVQPKNWLPGPCYRQQRVSKTKTDNNNSNFTWTGASKYNLNGRESIINPGTAMASHKDDEDKFFPMSGVMIFGKESAGASNTALDNVMITDEEEIKATNPVATERFGTVAVNFQSSSTDPATGDVHAMGALPGMVWQDRDVYLQGPIWAKIPHTDGHFHPSPLMGGFGLKNPPPQILIKNTPVPANPPAEFSATKFASFITQYSTGQVSVEIEWELQKENSKRWNPEVQYTSNYAKSANVDFTVDNNGLYTGPRPIGTRYLTRPL

SEQ ID NO: 3136 - protein, 736 aa, Artificial Sequence
  Synthetic polypeptide
MAADGYLPDWLEDNLSEGIREWWDLKPGAPKPKANQQKQDDGRGLVLPGYKYLGPFNGLDKGEPVNAADAAALEHDKAYDQQLKAGDNPYLRYNHADAEFQERLQEDTSFGGNLGRAVFQAKKRVLEPLGLVEEGAKTAPGKKRPVEQSPQEPDSSSGIGKTGQQPAKKRLNFGQTGDSESVPDPQPLGEPPATPAAVGPTTMASGGGAPMADNNEGADGVGNAPGNWHCDSTWLGDRVITTSTRTWALPTYNNHLYKQISSASTGASNDNHYFGYSTPWGYFDFNRFHCHFSPRDWQRLINNNWGFRPKRLNFKLFNIQVKEVTTNDGVTTIANNLTSTVQVFSDSEYQLPYVLGSAHQGCLPPFPADVFMIPQYGYLTLNNGSQAVGRSSFYCLEYFPSQMLRTGNNFTFSYTFEEVPFHSSYAHSQSLDRLMNPLIDQYLYYLNRTQNQSGSAQNKDLLFSRGSPAGMSVQPKNWLPGPCYRQQRVSKTKTDNNNSNFTWTGASKYNLNGRESIINPGTAMASHKDDEDKFFPMSGVMIFGKESAGASNTALDNVMITGEEEIKATNPVATERFGTVAVNFQSSSTDPATGDVHAMGALPGMVWQDRDVYLQGPIWAKIPHTDGHFHPSPLMGGFGLKNPPPQILIKNTPVPANPPAEFSATKFASFITQYSTGQVSVEIEWELQKENSKRWNPEVQYTSNYAKSANVDFTVDNNGLYTEPRPIGTRYLTRPL

SEQ ID NO: 3137 - protein, 736 aa, Artificial Sequence
  Synthetic polypeptide
MAADGYLPDWLEDNLSEGIREWWDLKPGAPKPKANQQKQDDGRGLVLPGYKYLGPFNRLDKGEPVNAADAAALEHDKAYDQQLKAGDNPYLRYNHADAEFQERLQEDTSFGGNLGRAVFQAKKRVLEPLGLVEEGAKTAPGRKRPVEQSPQEPDSSSGIGKTGQQPAKKRLNFGQTGDSESVPDPQPLGEPPATPAAVGPTTMASGGGAPMADNNEGADGVGNASGNWHCDSTWLGDRVITTSTRTWALPTYNNHLYKQISSASTGASNDNHYFGYSTPWGYFDFNRFHCHFSPRDWQRLINNNWGFRPKRLNFKLFNIQVKEVTTNDGVTTIANNLTSTVQVFSDSEYQLPYVLGSAHQGCLPPFPADVFMIPQYGYLTLNNGGQAVGRSSFYCLEYFPSQMLRTGNNFTFSYTFEEVPFHSSYAHSQSLDRLMNPLIDQYLYYLNRTQNQSGSAQNKDLLFSRGSPAGMSVQPKNWLPGPCYRQQRVSKTKTDNNNSNFTWTGASKYSLNGRESIINPGTAMASHKDDEDKFFPMGGVMIFGKESAGASNTALDNAMITDEEEIKATNPVATERFGTVAVNFQSSSTDPATGDVHAMGALPGMVWQDRDVYLQGPIWAKIPHTDGHFHPSPLMGGFGLKNPPPQILIKNTPVPANPPAEFSATKFASFITQYSTGQVSVEIEWELQKENSKRWNPEVQYTSNYAKSANVDFTVDNNGLYTEPRPIGTRYLTRPL

SEQ ID NO: 3138 - protein, 736 aa, Artificial Sequence
  Synthetic polypeptide
MAADGYLPDWLEDNLSEGIREWWDLKPGAPKPKANQQKQDDGRGLVLPGYKYLGPFNGLDKGEPVNAADAAALEHDKAYDQQLKAGDNPYLRYNHADAEFQERLQEDTSFGGNLGRAVFQAKKRVLEPLGLVEEGAKTAPGKKRPVEQSPQEPDSSSGIGKTGQQPAKKRLNFGQTGDSESVPDPQPLGEPPATPAAVGPTTMASGGGAPMADNNEGADGVGNASGNWHCDSTWLGGRVITTSTRTWALPTYNNHLYKQISSASTGASNDNHYFGYSTPWGYFDFNRFHCHFSPRDWQRLINNNWGFRPKRLNFKLFNIQVKEVTTNDGVTTIANNLTSTVQVFSDSEYQLPYVLGSAHQGCLPPFPADVFMIPQYGYLTLNNGSQAVGRSSFYCLEYFPSQMLRTGNNSTFSYTFEEVPFHSSYAHSQSLDRLMNPLIDQYLYYLNRTQNQSGSAQNKDLLFSRGSPAGMSVQPKNWLPGPCYRQQRVSKTKTDNNNSNFTWTGASKYNLNGRESIINPGTAMASHKDDEDKFFPMSGVMIFGKESAGASNTALDNVMITDEEEIKATNPVATERFGTVAVNFQSSSTDPATGDVHAMGTLPGMVWQDRDVYLQGPIWAKIPHTDGHFHPSPLMGGFGLKNPPPQILIKNTPVPANPPAEFSATKFASFITQYSTGQVSVEIEWELQKENSKRWNPEVQYTSNYAKSANVDFTVDNNGLYTEPRPIGTRYLTRPL

SEQ ID NO: 3139 - protein, 736 aa, Artificial Sequence
  Synthetic polypeptide
MAADGYLPDWLEDNLSEGIREWWDLKPGAPKPKANQQKQDDGRGLVLPGYKYLGPFNGLDKGEPVSAADAAALEHDKAYDQQLKAGDNPYLRYNHADAEFQERLQEDTSFGGNLGRAVFQAKKRVLEPLGLVEEGAKTAPGKKRPVEQSPQEPDSSSGIGKTGQQPAKERLNFGQTGDSESVPDPQPLGEPPATPAAVGPTTMASGGGAPMADNNEGADGVGNASGNWHCDSTWLGDRVITTSTRTWALPTYNNHLYKQISSASTGASNDNHYFGYSTPWGYFDFNRFHCHFSPRDWQRLINNNWGFRPKRLNFKLFNIQVKEVTTNDGVTTIANNLTSTVQVFSDSEYQLPYVLGSAHQGCLPPFPADVFMIPQYGYLTLNNGSQAVGRSSFYCLEYFPSQMLRTGNNFTFSYTFEEVPFHSSYAHSQSLDRLMNPLIDQYLYYLNRTQNQSGSAQNKDLLFSRGSPAGMSVQPKNWLPGPCYRQQRVSKTKTDNNNSNFTWTGASKYNLNGRESIINPGTAMASHKDDEDKFFPMSGVMIFGKESAGASNTALDNVMITDEEEIKATNPVATERFGTVAVNFQSSSTDPATGDVHAMGALPGMVWQDRDVYLQGPIWAKIPHTDGHFHPSPLMGGFGLKNPPPQILIKNTPVPANPPAEFSATKFASFITQYSTGQVSVEIEWELQKENSKRWNPEVQYTSNYAKSANVDFTVDNNGLYTEPRPIGTRYLTRPL

SEQ ID NO: 3140 - protein, 736 aa, Artificial Sequence
  Synthetic polypeptide
MAADGYLPDWLEDNLSEGIREWWDLKPGAPKPKANQQKQDDGRGLVLPGYKYLGPFNGLDKGEPVNAADAAALEHDKAYDQQLKAGDNPYLRYNHADAEFQERLQEDTSFGGNLGRAVFQAKKRVLEPLGLVEEGAKTAPGKKRPVEQSPQEPDSSSGIGKTGQQPAKKRLNFGQTGDSESVPDPQPLGEPPATPAAVGPTTMASGGGAPMADNNEGADGVGNASGNWHCDSTWLGDRVITTSTRTWALPTYNNHLYKQISSASTGASNDNHYFGYSTPWGYFDFNRFHCHFSPRDWQRLINNNWGFRPKRLNFKLFNIQVKEVTTNDGVTTIANNLTSTVQVFSDSEYQLPYVLGSAHQGCLPPFPADVFMIPQYGYLTLNNGSQAVGRSSFYCLEYFPSQMLRTGNNFTFSYTFEEVPFHSSYAHSQSLDRLMNPLIDQYLYYLNRTQNQSGSAQNKDLLFSRGSPAGMSVQPKNWLPGPCYRQQRVSKTKTDNNNSNFTWTGASKYNLNGRESIINPGTAMASHKDDEDKFFPMSGVMIFGKESAGASNTALDNVMITDEGEIKATNPVATERFGTVAVNFQSSSTDPATGDVHAMGALPGMVWQDRDVYLQGPIWAKIPHTDGHFHPSPLMGGFGLKNPPPQILIKNTPVPANPPAEFSATKFASFITQYSTGQVSVEIEWELQKENSKRWNPEVQYTSNYAKSANVDFTVDNNGLYTEPRPIGTRYLTRPL

SEQ ID NO: 3141 - protein, 736 aa, Artificial Sequence
  Synthetic polypeptide
MAADGYLPDWLEDNLSEGIREWWDLKPGAPKPKANQQKQDDGRGLVLPGYKYLGPFNGLDKGEPVNAADAAALEHDKAYDQQLKAGDNPYLRYNHADAEFQERLQEDTSFGGNLGRAVFQAKKRVLEPFGLVEEGAKTAPGKKRPVEQSPQEPDSSSGIGKTGQQPAKKRLNFGQTGDSESVPDPQPLGEPPATPAAVGPTTMASGGGAPMADNNEGADGVGNASGNWHCDSTWLGDRVITTSTRTWALPTYNNHLYKQISSASTGASNDNHYFGYSTPWGYFDFNRFHCHFSPRDWQRLINNNWGFRPKRLNFKLFNIQVKEVTTNDGVTTIANNLTSTVQVFSDSEYQLPYVLGSAHQGCLPPFPADVFMIPQYGYLTLNNGSQAVGRSSFYCPEYFPSQMLRTGNNFTFSYTFEEVPFHSSYAHSQSLDRLMNPLIDQYLYYLNRTQNQSGSAQNKDLLFSRGSPAGMSVQPKNWLPGPCYRQQRVSKTKTDNNNSNFTWTGASKYNLNGRESIINPGTAMASHKDDKDKFFPMSGVMIFGKESAGASNTALDNVMITDEEEIKATNPVATERFGTVAVNFQSSNTDPATGDVHVMGALPGMVWQDRDVYLQGPIWAKIPHTDGHFHPSPLMGGFGLKHPPPQILIKNTPVPANPPAEFSATKFASFITQYSTGQVSVEIEWELQKENSKRWNPEVQYTSNYAKSANVDFTVDNNGLYTEPRPIGTRYLTRPL

SEQ ID NO: 3142 - protein, 736 aa, Artificial Sequence
  Synthetic polypeptide
MAADGYLPDWLEDNLSEGIREWWDLKPGAPKPKANQQKQDDGRGLVLPGYKYLGPFNGLDKGEPVNAADAAALEHDKAYDQQLKAGDNPYLRYNHADAEFQERLQEDTSFGGNLGRAVFQAKKRVLEPFGLVEEGAKTAPGKKRPVEQSPQEPDSSSGIGKTGQQPAKKRLNFGQTGDSESVPDPQPLGEPPATPAAVGPTTMASGGGAPMADNNEGADGVGNASGNWHCDSTWLGDRVITTSTRTWALPTYNNHLYKQISSASTGASNDNHYFGYSTPWGYFDFNRFHCHFSPRDWQRLINNNWGFRPKRLNFKLFNIQVKEVTTNDGVTTIANNLTSTVQVFSDSEYQLPYVLGSAHQGCLPPFPADVFMIPQYGYLTLNNGSQAVGRSSFYCLEYFPSQMLRTGNNFTFSYTFEEVPFHSSYAHSQSLDRLMNPLIDQYLYYLNRTQNQSGSAQNKDLLFSRGSPAGMSVQPKNWLPGPCYRQQRVSKTKTDNNNSNFTWTGASKYNLNGRESIINPGTAMASHKDDKDKFFPMSGVMIFGKESAGASNTALDNVMITDEEEIKATNPVATERFGTVAVNFQSSDTDPATGDVHVMGALPGMVWQDRDVYLQGPIWAKIPHTDGHFHPSPLMGGFGLKHPPPQILIKNTPVPANPPAEFSATKFASFITQYSTGQVSVEIEWELQKENSKRWNPEVQYTSNYAKSANVDFTVDNNGLYTEPRPIGTRYLTRPL

SEQ ID NO: 3143 - protein, 736 aa, Artificial Sequence
  Synthetic polypeptide
MAADGYLPDWLEDNLSEGIREWWDLKPGAPKPKANQQKQGDGRGLVLPGYKYLGPFNGLDKGEPVNAADAAALEHDKAYDQQLKAGDNPYLRYNHADAEFQERLQEDTSFGGNLGRAVFQAKKRVLEPFGLVEEGAKTAPGKKRPVEQSPQEPDSSSGIGKTGQQPAKKRLNFGQTGDSESVPDPQPLGEPPATPAAVGPTTMASGGGAPMADNNEGADGVGNASGNWHCDSTWLGDRVITTNTRTWALPTYNNHLYKQISSASTGASNDNHYFGYSTPWGYFDFNRFHCHFSPRDWQRLINNNWGFRPKRLNFKLFNIQVKEVTTNDGVTTIANNLTSTVQVFSDSEYQLPYVLGSAHQGCLPPFPADVFMIPQYGYLTLNNGSQAVGRSSFYCLEYFPSQMLRTGNNFTFSYTFEEVPFHSSYGHSQSLDRLMNLLIDQYLYYLNRTQNQSGSAQNKDLLFSRGSPAGMFVQPKNWLPGPCYRQQRVSKTKTDNNNSNFTWTGASKYNLNGRESIINPGTAMASHKDDEDKFFPMSGVMIFGKESAGASNTALDNVMITDEEEIKATNPVATERFGTVAVNFQSSSTDPATGDVHVMGALPGMVWQDRDVYLQGPIWAKIPHTDGHFHPSPLMGGFGLKHPPPQILIKNTPVPANPPAEFSATKFASFITQYSTGQVSVEIEWELQKENSKRWNPEVQYTSNYAKSANVDFTVDNNGLYTEPRPIGTRYLTRPL

SEQ ID NO: 3144 - protein, 736 aa, Artificial Sequence
  Synthetic polypeptide
MAADGYLPDWLEDNLSEGIREWWDLKPGAPKPKANQQKQDDGRGLVLPGYKYLGPFNGLDKGEPVNAADAAALEHDKAYDQQLKAGDNPYLRYNHADAEFQERLQEDTSFGGNLGRAVFQAKKRVLEPFGLVEEGAKTAPGKKRPVEQSPQEPDSSSGIGKTGQQPAKKRLNFGQTGDSESVPDPQPLGEPPATPAAVGPTTMASGGGAPMADNNEGADGVGNASGNWHCDSTWLGDRVITTNTRTWALPTYNNHLYKQISSASTGASNDNHYFGYSTPWGYFDFNRFHCHFSPRDWQRLINNNWGFRPKRLNFKLFNIQVKEVTTNDGVTTIANNLTSTVQVFSDSEYQLPYVLGSAHQGCLPPFPADVFMIPQYGYLMLNNGSQAVGRSSFYCLEYFPSQMLRTGNNFTFSYTFEEVPFHSSYAHSQSLDRLMNPLIDQYLYYLNRTQNQSGSAQNKDLLFSRGSPAGMSVQPKNWLPGPCYRQQRVSKTKTDNNNSNFTWTGASKYNLNGRESIINPGTAMASHKDDEDKFFPMSGVMIFGKESAGASNTALDNVMITDEEEIKATNPAATERFGTVAVNFQSSSTDPATGDVHVMGALPGMVWQDRDVYLQGPIWAKIPHTDGHFHPSPLMGGFGLKHPPPQILIKNTPVPANPPAEFSATKFASFITQYSTGQVSVEIEWELQKENSKRWNPEVQYTSNYAKSANVDFTVDNNGLYTEPRPIGTRYLTRPL

SEQ ID NO: 3145 - protein, 736 aa, Artificial Sequence
  Synthetic polypeptide
MAADGYLPDWLEDNLSEGIREWWDLKPGAPKPKANQQKQDDGRGLVLPGYKYLGPFNGLDKGEPVNAADAAALEHDKAYDQQLKAGDNPYLRYNHADAEFQERLQEDTSFGGNLGRAVFQAKKRVLEPFGLVEEGAKTAPGKKRPVEQSPQEPDSSSGIGKTGQQPAKKRLNFGQTGDSESVPDPQPLGEPPATPAAVGPTTMASGGGAPMADNNEGADGVGNASGNWHCDSTWLGDRVITTSTRTWALPTYNNHLYKQISSASTGASNDNHYFGYSTPWGYFDFNRFHCHFSPRDWQRLINNNWGFRPKRLNFKLFNIQVKEVTTNDGVTTIANNLTSTVQVFSDSEYQLPYVLGSAHQGCLPPFPADVFMIPQYGYLTLNNGSQAVGRSSFYCLEYFPSQMLRTGNNFTFSYTFEEVPFHSSYAHSQSLDRLMNPLIDQYLYYLNRTQNQSGSAQNKDLLFSRGSPAGMSVQPKNWLPGPCYRQQRVSKTKTDNNNSNFTWTGASKYNLNGRESIINPGTAMASHKDDEDKFFPMSGVMIFGKESAGASNTALDNVMITDEEEIKATNPVATERFGTVAVNFQSSSTDPATGDVHVMGALPGMVWQDRDVYLQGPIWAKIPHTDGHFHPSPLMGGFGLKHPPPQILIKNTPVPANPPAEFSATKFASFITQYSTGQVSVEIEWELQKENSKRWNPEVQYTSNYAKSANVDFTVDNNGLYTEPRPIGTRYLTRPL

SEQ ID NO: 3146 - protein, 736 aa, Artificial Sequence
  Synthetic polypeptide
  MOD_RES (102)..(102): Any naturally occurring amino acid
MAADGYLPDWLEDNLSEGIREWWDLKPGAPKPKANQQKQDDGRGLVLPGYKYLGPFNGLDKGEPVNAADAAALEHDKAYDQQLKAGDNPYLRYNHADAEFQXRLQEDTSFGGNLGRAVFQAKKRVLEPFGLVEEGAKTAPGKKRPVEQSPQEPDSSSGIGKTGQQPAKKRLNFGQTGDSESVPDPQPLGEPPATPAAVGPTTMASGGGAPMADNNEGADGVGNASGNWHCDSTWLGGRVITTSTRTWALPTYNNHLYKQISSASTGASNDNHYFGHSTPWGYFDFNRFHCHFSPRDWQRLINNNWGFRPKRLNFKLFNIQVKEVTTNDGVTTIANNLTSTVQVFSDSEYQLPYVLGSAHQGCLPPSPADVFMIPQYGYLTLNNGSQAVGRSSFYCLEYFPSQMLRTGNNFTFSYTFEEVPFHSSYAHSQSLDRLMNPLIDQYLYYLNRTQNQSGSAQNKDLLFSRGSPAGMSVQPKNWLPGPCYRQQRVSKTKTDNNNSNFTWTGASKYNLNGRESIINPGTAMASHKDDKDKFFPMSGVMIFGKESAGASNTALDNVMITDEEEIKATNPVATERFGTVAVNFQSSNTDPATGDVHVMGALPGMVWQDRDVYLQGPIWAKIPHTDGHFHPSPLMGGFGLKHPPPQILIKNTPVPANPPAEFSATKFASFITQYSTGQVSVEIEWELQKENSKRWNPEVQYTSNYAKSANVDFTVDNNGLYTEPRPIGTRYLTRPL

SEQ ID NO: 3147 - protein, 736 aa, Artificial Sequence
  Synthetic polypeptide
MAADGYFPDWLEDNLSEGIREWWDLKPGAPKPKANQQKQDDGRGLVLPGYKYLGPFNGLDKGEPVNAADAAALEHDKAYDQQLKAGDNPYLRYNHADAEFQERLQEDTSFGGNLGRAVFQAKKRVLEPFGLVEEGAKTAPGKKRPVEQSPQEPDSSSGIGRTGQQPAKKRLNFGQTGDSESVPDPQPLGEPPATPAAVGPTTMASGGGAPMADNNEGADGVGNASGNWHCDSTWLGDRVITTSTRTWALPTYNNHLYKQISSASTGASNDNHYFGYSTPWGYFDFNRFHCHFSPRDWQRLINNNWGFRPKRLNFKLFNIQVKEVTTNDGVTTIANNLTSTVQVFSDSEYQLPYVLGSAHQGCLPPFPADVFMIPQYGYLTLNNGSQAVGRSSFYCLEYFPSQMLRTGNNFTFSYTFEEVPFHSSYAHSQSLDRLMNPLIDQYLYYLNRTQNQSGSAQNKDLLFSRGSPAGMSVQPKNWLPGPCYRQQRVSKTKTDNNNSNFTWTGASKYNLNGRESIINPGTAMASHKDDEDKFFPMSGVMIFGKESAGASNTALDNVMITDEEEIKATNPVATERFGTVAVNFQSSSPDPATGDVHVMGALPGMVWQDRDVYLQGPIWAKIPHTDGHFHPSPLMGGFGLKHPPPQILIKNTPVPANPPAEFSATKFASFITQYSTGQVSVEIEWELQKENSKRWNPEVQYTSNYAKSANVDFTVDNNGLYSEPRPIGTRYLTRPL

SEQ ID NO: 3148 - protein, 736 aa, Artificial Sequence
  Synthetic polypeptide
MAADGYLPDWLEDNLSEGIREWWDLKPGAPKPKANQQKQDDGRGLVLPGYKYLGPFNGLDKGEPVNAADAAALEHDKAYDQQLKAGDNPYLRYNHADAEFQERLQEDTSFGGNLGRAVFQAKKRVLEPFGLVEEGAKTAPGKKRPVEQSPQEPDSSSGIGKTGQQPAKKRLNFGQTGDSESVPDPQPLGEPPATPAAVGPTTMASGGGAPMADNNEGADGVGNASGNWHCDSTWLGDRVITTSTRTWALPTYNNHLYKQTSSASTGASNDNHYFGYSTPWGYFDFNRFHCHFSPRDWQRLINNNWGFRPKRLNFKLFNIQVKEVTTNDGVTTIANNLTSTVQVFSDSEYQLPYVLGSAHQGCLPPFPADVFMIPQYGYLTLNNGSQAVGRSSFYCLEYFPSQMLRTGNNFTFSYTFEEVPFHSSYAHSQSLDRLMNPLIDQYLYYLNRTQNQSGSAQNKDLLFSRGSPAGMSVQPKNWLPGPCYRQQRVSKTKTDYNNSNFTWTGASKYNLNGRESIINPGTAMASHKDDEDKFFPMSGVMIFGKESAGASNTALDNVMITDEEEIKATNPVATERFGTVAVNFQSSSTDPATGDVHVMGALPGMVWQDRDVYLQGPIWAKIPHTDGHFHPSPLMGGFGLKHPPPQILIKNTPVPANPPAEFSATKFASFITQYSTGQVSVEIEWELQKENSKRWNPEVQYTSNYAKSANVDFTVDNNGLYTEPRPIGTRYLTRPL

SEQ ID NO: 3149 - protein, 736 aa, Artificial Sequence
  Synthetic polypeptide
MAADGYPPDWLEDNLSEGIREWWDLKPGVPKPKANQQKQDDGRGLVLPGYKYLGPFNGLDKGEPVNAADAAALEHDKAYDQQLKAGDNPYLRYNHADAEFQERLQEDTSFGGNLGRAVFQAKKRVLEPFGLVEEGAKTAPGKKRPVEQSPQEPDSSSGIGKTGQQPAKKRLNFGQTGDSESVPDPQPLGEPPATPAAVGPTTMASGGGAPMADNNEGADGVGNASGNWHCDSTWLGDRVITTSTRTWALPTYNNHLYKQISSASTGASNDNHYFGYSTPWGYFDFNRFHCHFSPRDWQRLINNNWGFRPKRLNFKLFNIQVKEVTTNDGVTTIANNLTSTVQVFSDSEYQLPYVLGSAHQGCLPPFPADVFMIPQYGYLTLNNGSQAVGRSSFYCLEYFPSQMLRTGNNFTFSYTFEEVPFHSSYAHSQSLDRLMNPLIDQYLYYLNRTQNQSGSAQNKDLLFSRGSPAGMSVQPKNWLPGPCYRQQRVSKTKTDNNNSNFTWTGASKYNLNGRESIINPGTAMASHKDDEDKFFPMSGVMIFGKESAGASNTALDNVMITDEEEIKATNPVATERFGTVAVNFQSSSTDPATGDVHVMGALPGMVWQDRDVYLQGPIWAKIPHTDGHFHPSPLMGGFGLKHPPPQILIKNTPVPANPPAEFSATKFASFITQYSTGQVSVEIEWELQKENSKRWNPEVQYTSNYAKSANVDFTVDNNGLYTEPRPIGTRYLTRPL

SEQ ID NO: 3150 - protein, 732 aa, Artificial Sequence
  Synthetic polypeptide
MAADGYLPDWLEDNLSEGIREWWDLKPGAPKPKANQQKQDDGRGLVLPGYKYLGPFNGLDKGEPVNAADAAALEHDKAYDQQLKAGDNPYLRYNHADAEFQERLQEDTSFGGNLGRAVFQAKKRVLEPFGLVEEGAKTAPGKKRPVEQSPQEPDSSSGIGKTGQQPAKKRLNFGQTGDSESVPDPQPLGEPPATPAAVGPTTMASGGGAPMADNNEGADGVGNASGNWHCDSTWLGDRVITTSTRTWALPTYNNHLYKQISSASTGASNDNHYFGYSTPWGYFDFNRFHCHFSPRDWQRLINNNWGFRPKRLNFKLFNIQVKEVTTNDGVTTIANNLTSTVQAFSDSEYQLPYVLGSAHQGCLPPFPADVFMIPQYGYLTLNNGSQAVGRSSFYCLEYFPSQMLRTGNNFTFSYTFEEVPFHSSYAHSQSLDRLMNPLIDPYLYYLNRTQNQSGSAQNKDLLFSRGSPAGMSVQPKNWLPGPCYRQQRVSKTKTDNNNSNFTWTGASKYNLNGRESIINPGTAMASHKDDEDKFFPMSGVMIFGKESAGASNTALDNVMITDEEEIKATNPVATERFGTVAVNFQSSSTDPATGDVHVMGALPGMVWQDRDVYLQGPIWAKIPHTDGHFHPSPLMGGFGLKHPPPQILIKNTPVPANPPAEFSATKFASFITQYSTGQVSVEIEWELQKENSKRWNPEVQYTSNYAKSANVDFTVDNNGLYTEPRPIGTRYL

SEQ ID NO: 3151 - protein, 736 aa, Artificial Sequence
  Synthetic polypeptide
MAADGYLPDWLEDNLSEGIREWWDLKPGAPKPKANQQKQDDGRGLVLPGYKYLGPFNGLDKGEPVNAADAAALEHDKAYDQQLKAGDNPYLRYNHADAEFQERLQEDTSFGGNLGRAVFQAKKRVLEPFGLVEEGAKTAPGKKRPVEQSPQEPDSSSGIGKTGQQPAKKRLNFGQTGDSESVPDPQPLGEPPATPAAVGPTTMASGGGAPMADNNEGADGVGNASGNWHCDSTWLGDRVITTSTRTWALPTYNNHLYKQISSASTGASNDNHYFGYSTPWGYFDFNRFHCHFSPRDWQRLINNNWGFRPKRLNFKLFNIQVKEVTTNDGVTTIANNLTSTVQVFSDSEYQLPYVLGSAHQGCLPPFPADVFMIPQYGYLTLNNGSQAVGRSSFYCLEYFPSQMLRTGNNFTFSYTFEEVPFHSSYAHSQSLDRLMNPLIDQYLYYLNRTQNQSGSAQNKDLLFSRGSPAGMSVQPKNWLPGPCYRQQRVSKTKTDNNNSNFTWTGASKYNLNGRESIINPGTAMASHKDDEDKFFPMSGVMIFGKESAGASNTALDNVMITDEEEIKATNPVATERFGTVAVNFQSSSTDPATGDVHVMGALPGMVWQDRDVYLQGPIWAKIPHTDGHSHPSPLMGGFGLKHPPPQILIKNTPVPANPPAEFSATKFASFITQYSTGQVSVEIEWELQKENSKRWNPEVQYTSNYAKSANVDFTVDNNGLYTEPRPIGTRYLTRPL

SEQ ID NO: 3152 - protein, 736 aa, Artificial Sequence
  Synthetic polypeptide
MAADGYLPDWLEDNLSEGIREWWDLKPGAPKPKANQQKQDDGRGLVLPGYKYLGPFNGLDKGEPVNAADAAALEHDKAYDQQLKAGDNPYLRYNHADAEFQERLQEDTSFGGNLGRAVFQAKKRVLEPFGLVEEGAKTAPGKKRPVEQSPQEPDSSSGIGKTGQQPAKKRLNFGQTGDSESVPDPQPLGEPPATPAAVGPTTMASGGGAPMADNNEGADGVGNASGNWHCDSTWLGDRVITTSTRTWALPTYNNHLYKQISSASTGASNDNHYFGYSTPWGYFDFNRFHCHFSPRDWQRLINNNWGFRPKRLNFKLFNIQVKEVTTNDGVTTIANNLTSTVQVFSDSEYQLPYVLGSAHQGCLPPFPADVFMIPQYGYLTLNNGSQAVGRSSFYCLEYFPSQMLRTGNNFTFSYTFEEVPFHSSYAHSQSLDRLMNPLIDLYLYYLNRTQNQSGSAQNKDLLFSRGSPAGMSVQPKNWLPGPCYRQQRVSKTKTDNNNSNFTWTGASKYNLNGRESIINPGTAMASHKDDEDKFFPMSGVMIFGKESAGTSNTALDNVMITDEEEIKATNPVATERFGTVAVNFQSSSTDPATGDVHVMGALPGMVWQDRDVYLQGPIWAKIPHTDGHFHPSPLMGGFGLKHPPPQILIKNTPVPANPPAEFSATKFASFITQYSTGQVSVEIEWELQKENSKRWNPEVQYTSNYAKSANVDFTVDNNGLYTEPRPIGTRYLTRPL

SEQ ID NO: 3153 - protein, 736 aa, Artificial Sequence
  Synthetic polypeptide
MAADGYLPDWLEDSLSEGIREWWDLKPGAPKPKANQQKQDDGRGLVLPGYKYLGPFNGLDKGEPVNAADAAALEHDKAYDQQLKAGDNPYLRYNHADAEFQERLQEDTSFGGNLGRAVFQAKKRVLEPFGLVEEGAKTAPGKKRPVEQSPQEPDSSSGIGKTGQQPAKKRLNFGQTGDSESVPDPQPLGEPPATPAAVGPTTMASGGGAPMADNNEGADGVGNASGNWHCDSTWLGDRVITTSTRTWALPTYNNHLYKQISSASTGASNDNHYFGYSTPWGYFDFNRFHCHFSPRDWQRLINNNWGFRPKRLNFKLFNIQVKEVTTNDGVTTIANNLTSTVQVFSDSEYQLPYVLGSAHQGCLPPFPADVFMIPQYGYLTPNNGSQAVGRSSFYCLEYFPSQMLRTGNNFTFSYTFEEVPFHSSYAHSQSLDRLMNPLIDQYQYYLNRTQNQSGSAQNKDLLFSRGSPAGMSVQPKNWLPGPCYRQQRVSKTKTDNNNSNFTWTGASKYNLNGRESIINPGTAMASHKDDEDKFFPMSGVMIFGKESAGASNTALDNVMITDEEEIKATNPVATERFGTVAVNFQSSSTDPATGDVHVMGALPGMVWQDRDVYLQGPIWAKIPHTDGHFHPSPLMGGFGLKHPPPQILIKNTPVPANPPAEFSATKFASFITQYSTGQVSVEIEWELQKENSKRWNPEVQYTSNYAKSANVDFTVDNNGLYTEPRPIGTRYLTRPL

SEQ ID NO: 3154 - protein, 736 aa, Artificial Sequence; identical to SEQ ID NO: 3145
  Synthetic polypeptide

SEQ ID NO: 3155 - protein, 735 aa, Artificial Sequence
  Synthetic polypeptide
MAADGYLPDWLEDTLSEGIRQWWKLKPGPPPPKPAERHKDDSRGLVLPGYKYLGPFNGLDKGEPVNEADAAALEHDKAYDRQLDSGDNPYLKYNHADAEFQERLKEDTSFGGNLGRAVFQAKKRVLEPLGLVEEPVKTAPGKKRPVEHSPVEPDSSSGTGKAGQQPARKRLNFGQTGDADSVPDPQPLGQPPAAPSGLGTNTMATGSGAPMADNNEGADGVGNSSGNWHCDSTWMGDRVITTSTRTWALPTYNNHLYKQISSQSGASNDNHYFGYSTPWGYFDFNRFHCHFSPRDWQRLINNNWGFRPKRLNFKLFNIQVKEVTQNDGTTTIANNLTSTVQVFTDSEYQLPYVLGSAHQGCLPPFPADVFMVPQYGYLTLNNGSQAVGRSSFYCLEYFPSQMLRTGNNFTFSYTFEDVPFHSSYAHSQSLDRLMNPLIDQYLYYLSRTNTPSGTTTQSRLQFSRAGASDIRDQSRNWLPGPCYRQQRVSKTSADNNNSEYSWTGATKYHLNGRDSLVNPGPAMASHKDDEEKFFPQSGVLIFGKQGSEKTNVDIEKVMITDEEEIRTTNPVATEQYGSVSTNLQRGNRQAATADVNTQGVLPGMVWQDRDVYLQGPIWAKIPHTDGHFHPSPLMGGFGLKHPPPQILIKNTPVPANPSTTFSAAKFASFITQYSTGQVSVEIEWELQKENSKRWNPEIQYTSNYNKSVNVDFTVDTNGVYSEPRPIGTRYLTRNL

SEQ ID NO: 3156 - DNA, 2211 bp, Artificial Sequence
  Synthetic polynucleotide
atggctgctgacggttatcttccagattggctcgaggacaacctttctgaaggcattcgtgagtggtgggctctgaaacctggagtccctcaacccaaagcgaaccaacaacaccaggacaaccgtcggggtcttgtgcttccgggttacaaatacctcggacccggtaacggactcgacaaaggagagccggtcaacgaggcggacgcggcagccctcgaacacgacaaagcttacgaccagcagctcaaggccggtgacaacccgtacctcaagtacaaccacgccgacgccgagtttcaggagcgtcttcaagaagatacgtcttttgggggcaaccttggcagagcagtcttccaggccaaaaagaggatccttgagcctcttggtctggttgaggaagcagctaaaacggctcctggaaagaagaggcctgtagatcagtctcctcaggaaccggactcatcatctggtgttggcaaatcgggcaaacagcctgccagaaaaagactaaatttcggtcagactggcgactcagagtcagtcccagaccctcaacctctcggagaaccaccagcagcccccacaagtttgggatctaatacaatggcttcaggcggtggcgcaccaatggcagacaataacgagggtgccgatggagtgggtaattcctcaggaaattggcattgcgattcccaatggctgggcgacagagtcatcaccaccagcaccagaacctgggccctgcccacttacaacaaccatctctacaagcaaatctccagccaatcaggagcttcaaacgacaaccactactttggctacagcaccccttgggggtattttgactttaacagattccactgccacttctcaccacgtgactggcagcgactcattaacaacaactggggattccggcccaagaaactcagcttcaagctcttcaacatccaagttaaagaggtcacgcagaacgatggcacgacgactattgccaataaccttaccagcacggttcaagtgtttacggactcggagtatcagctcccgtacgtgctcgggtcggcgcaccaaggctgcctcccgccgtttccagcggacgtcttcatggtccctcagtatggatacctcaccctgaacaacggaagtcaagcggtgggacgctcatccttttactgcccggagtacttcccttcgcagatgctaaggactggaaataacttccaattcagctataccttcgaggatgtaccttttcacagcagctacgctcacagccagagtttggatcgcttgatgaatcctcttattgatcagtatctgtactacctgaacagaacgcaaggaacaacctctggaacaaccaaccaatcacggctgctttttagccaggctgggcctcagtctatgtctttgcaggccagaaattggctacctgggccctgctaccggcaacagagactttcaaagactgctaacgacaacaacaacagtaactttccttggacagcggccagcaaatatcatctcaatggccgcgactcgctggtgaatccaggaccagctatggccagtcacaaggacgatgaagaaaaatttttccctatgcacggcaatctaatatttggcaaagaagggacaacggcaagtaacgcagaattagataatgtaatgattacggatgaagaagagattcgtaccaccaatcctgtggcaacagagcagtatggaactgtggcaaataacttgcagagctcaaatacagctcccacgactagaactgtcaatgatcagggggccttacctggcatggtgtggcaagatcgtgacgtgtaccttcaaggacctatctgggcaaagattcctcacacggatggacactttcatccttctcctctgatgggaggctttggactgaaacatccgcctcctcaaatcatgatcaaaaatactccggtaccggcaaatcctccgacgactttcagcccggccaagtttgcttcatttatcactcagtactccactggacaggtcagcgtggaaattgagtgggagctacagaaagaaaacagcaaacgttggaatccagagattcagtacacttccaactacaacaagtctgttaatgtggactttactgtagacactaatggtgtttatagtgaacctcaccctattggaacccggtatctcacacgaaacttgtaa

SEQ ID NO: 3157 - DNA, 2211 bp, Artificial Sequence
  Synthetic polynucleotide
atggctgctgatggttatcttccagattggctcgaggacaacctttctgaaggcattcgtgagtggtgggctctgaaacctggagtccctcaacccaaagcgaaccaacaacaccaggacaaccgtcggggtcttgtgcttccgggttacaaatacctcggacccggtaacggactcgacaaaggagagccggtcaacgaggcggacgcggcagccctcgaacacgacaaagcttacgaccagcagctcaaggccggtgacaacccgtacctcaagtacaaccacgccgacgccgagtttcaggagcgtcttcaagaagatacgtcttttgggggcaaccttggcagagcagtcttccaggccaaaaagaggatccttgagcctcttggtctggttgaggaagcagctaaaacggctcctggaaagaagaggcctgtagatcagtctcctcaggaaccggactcatcatctggtgttggcaaatcgggcaaacagcctgccagaaaaagactaaatttcggtcagactggcgactcagagtcagtcccagaccctcaacctctcggagaaccaccagcagcccccacaagtttgggatctaatacaatggcttcaggcggtggcgcaccaatggcagacaataacgagggtgccgatggagtgggtaattcctcaggaaattggcattgcgattcccaatggctgggcgacagagtcatcaccaccagcaccagaacctgggccctgcccacttacaacaaccatctctacaagcaaatctccagccaatcaggagcttcaaacgacaaccactactttggctacagcaccccttgggggtattttgactttaacagattccactgccacttctcaccacgtgactggcagcgactcattaacaacaactggggattccggcccaagaaactcagcttcaagctcttcaacatccaagttaaagaggtcacgcagaacgatggcacgacgactgttgccaataaccttaccagcacggttcaagtgtttacggactcggagtatcaactcccgtacgtgctcgggtcggcgcaccaaggctgtctcccgccgtttccagcggacgtcttcatggtccctcagtatggatacctcaccctgaacaacggaagtcaagcggtgggacgctcatccttttactgcctggagtacttcccttcgcagatgctaaggactggaaataacttccaattcagctataccttcgaggatgtaccttttcacagcagctacgctcacagccagagtttggatcgcttgatgaatcctcttattgatcagtatctgtactacctgaacagaacgcaaggaacaacctctggaacaaccaaccaatcacggctgctttttagccaggctgggcctcagtctatgtctttgcaggccagaaattggctacctgggccctgctaccggcaacagagactttcaaagactgctaacgacaacaacaacagtaactttccttggacagcggccagcaaatatcatctcaatggccgcgactcgctggtgaatccaggaccagctatggccagtcacaaggacgatgaagaaaaatttttccctatgcacggcaatctaatatttggcaaagaagggacaacggcaagtaacgcagaattagataatgtaatgattacggatgaagaagagattcgtaccaccaatcctgtggcaacagagcagtatggaactgtggcaaataacttgcagagctcaaatacagctcccacgactagaactgtcaatgatcagggggccttacctggcatggtgtggcaagatcgtgacgtgtaccttcaaggacctatctgggcaaagattcctcacacggatggacactttcatccttctcctctgatgggaggctttggactgaaacatccgcctcctcaaatcatgatcaaaaatactccggtaccggcaaatcctccgacgactttcagcccggccaagtttgcttcatttatcactcagtactccactggacaggtcagcgtggaaattgagtgggagctacagaaagaaaacagcaaacgttggaatccagagattcagtacacttccaactacaacaagtctgttaatgtggactttactgtagacactaatggtgtttatagtgaacctcgccctattggaacccggtatctcacacgaaacttgtaa

SEQ ID NO: 3158 - DNA, 2211 bp, Artificial Sequence
  Synthetic polynucleotide
atggctgctgacggttatcttccagattggctcgaggacaacctttctgaaggcattcgtgagtggtgggctctgaaacctggagtccctcaacccaaagcgaaccaacaacaccaggacaaccgtcggggtcttgtgcttccgggttacaaatacctcggacccggtaacggactcgacaaaggagagccggtcaacgaggcggacgcggcagccctcgaacacgacaaagcttacgaccagcagctcaaggccggtgacaacccgtacctcaagtacaaccacgccgacgccgagtttcaggagcgtcttcaagaagatacgtcttttgggggcaaccttggcagagcagtcttccaggccaaaaagaggatccttgagcctcttggtctggttgaggaagcagctaaaacggctcctggaaagaagaggcctgtagatcagtctcctcaggaaccggactcatcatctggtgttggcaaatcgggcaaacagcctgccagaaaaagactaaatttcggtcagactggcgactcagagtcagtcccagaccctcaacctctcggagaaccaccagcagcccccacaagtttgggatctaatacaatggcttcaggcggtggcgcaccaatggcagacaataacgagggtgccgatggagtgggtaattcctcaggaaattggcattgcgattcccaatggctgggcgacagagtcatcaccaccagcaccagaacctgggccctgcccacttacaacaaccatctctacaagcaaatctccggccaatcaggagcttcaaacgacaaccactactttggctacagcaccccttgggggtattttgactttaacagattccactgccacttctcaccacgtgactggcagcgactcattaacaacaactggggattccggcccaagaaactcagcttcaagctcttcaacatccaagttaaagaggtcacgcagaacgatggcacgacgactattgccaataaccttaccagcacggttcaagtgtttacggactcggagtatcagctcccgtacgtgctcgggtcggcgcaccaaggctgtctcccgccgtttccagcggacgtcttcatggtccctcagtatggatacctcaccctgaacaacggaagtcaagcggtgggacgctcatccttttactgcctggagtacttcccttcgcagatgctaaggactggaaataacttccaattcagctataccttcgaggatgtaccttttcacagcagctacgctcacagccagagtttggatcgcttgatgaatcctcttattgatcagtatctgtactacctgaacagaacgcaaggaacaacctctggaacaaccaaccaatcacggctgctttttagccaggctgggcctcagtctatgtctttgcaggccagaaattggctacctgggccctgctaccggcaacagagactttcaaagactgctaacggcaacaacaacagtaactttccttggacagcggccagcaaatatcatctcaatggccgcgactcgctggtgaatccaggaccagctatggccagtcacaaggacgatgaagaaaaatttttccctatgcacggcaatctaatatttggcaaagaagggacaacggcaagtaacgcagaattagataatgtaatgattacggatgaagaagagattcgtaccaccaatcctgtggcaacagagcagtgtggaactgtggcaaataacttgcagagctcaaatacagctcccacgactagaactgtcaatgatcagggggccttacctggcatggtgtggcaagatcgtgacgtgtaccttcaaggacctatctgggcaaagattcctcacacggatggacactttcatccttctcctctgatgggaggctttggactgaaacatccgcctcctcaaatcatgatcaaaaatactccggtaccggcaaatcctccgacgactttcagcccggccaagtttgcttcatttatcactcagtactccactggacaggtcagcgtggaaattgagtgggagctacagaaagaaaacagcaaacgttggaatccagagattcagtacacttccaactacaacaagtctgttaatgtggactttactgtagacactaatggtgtttatagtgaacctcgccctattggaacccggtatctcacacgaaacttgtaa

SEQ ID NO: 3159 - DNA, 2212 bp, Artificial Sequence
  Synthetic polynucleotide
  modified_base (1283)..(1283): a, c, g, or t
  misc_feature (1283)..(1283): n is a, c, g, or t
atggctgctgacggttatcttccagattggctcgaggacaacctttctgaaggcattcgtgagtggtgggctctgaaacctggagtccctcaacccaaagcgaaccaacaacaccaggacaaccgtcggggtcttgtgcttccgggttacaaatacctcggaccgggtaacggactcgacaaaggagagccggtcaacgaggcggacgcggcagccctcgaacacgacaaagcttacgaccagcagctcaaggccggtgacaacccgtacctcaagtacaaccacgccgacgccgagtttcaggagcgtcttcaagaagatacgtcttttgggggcaaccttggcagagcagtcttccaggccaaaaagaggatccttgagcctcttggtctggttgagggagcagctaaaacggctcctggaaagaagaggcctgtagatcagtctcctcaggaaccggactcatcatctggtgttggcaaatcgggcaaacagcctgccagaaaaagactaaatttcggtcagactggcgactcagagtcagtcccagaccctcaacctctcggagaaccaccagcagcccccacaagtttgggatctaatacaatggcttcaggcggtggcgcaccaatggcagacaataacgagggtgccgatggagtgggtaattcctcaggaaattggcattgcgattcccaatggctgggcgacagagtcatcaccaccagcaccagaacctgggccctgcccacttacaacagccatctctacaagcaaatctccagccaatcaggagcttcaaacgacaaccactactttggctacagcaccccttgggggtattttgactttaacagattccactgccacttctcaccacgtgactggcagcgactcattaacaacaactggggattccggcccaagaaactcagcttcaagctcttcaacatccaagttaaagaggtcacgcagaacgatggcacgacgactattgccaataaccttaccagcacggtccaagtgtttacggactcggagtatcagctcccgtacgtgctcgggtcggcgcaccaaggctgtctcccgccgtttccagcggacgccttcatggtccctcagtatggatacctcaccctgaacaacggaagtcaagcggtgggacgctcatccttttactgcctggagtacttcccttcgcagatgctaaggactggaaataacttccaattcagctataccttcgaggatgtaccttttcacggcagctacgctcacagccngagtttggatcgcttgatgaatcctcttattgatcagtatctgtactacctgaacagaacgcaaggaacaacctctggaacaaccaaccaatcacggctgctttttagccaggctgggcctcagtctatgtctttgcaggccagaaattggctacctgggccctgctaccggcaacagagacttttcaaagactgctaacgacaacaacaacagtaactttccttggacagcggccagcaaatatcatctcaatggccgcgactcgctggtgaatccaggaccagctatggccagtcacaaggacgatgaagaaaaatttttccctatgcacggcaatctaatatttggcaaagaagggacaacggcaagtaacgcagaattagataatgtaatgattacggatgaagaagagattcgtaccaccaatcctgtggcaacagagcagtatggaactgtggcaaataacttgcagagctcaaatacagctcccacgactagaactgtcaatgatcagggggccttacctggcatggtgtggcaagatcgtgacgtgtaccttcaaggacctatctgggcaaagattcctcacacggatggacactttcatccttctcctctgatgggaggctttggactgaaacatccgcctcctcaaatcatgatcaaaaatactccggtaccggcaaatcctccgacgactttcagcccggccaagtttgcttcatttatcactcagtactccactggacaggtcagcgtggaaattgagtgggagctacagaaagaaaacagcaaacgttggaatccagagattcagtacacttccaactacaacaagtctgttaatgtggactttactgtagacactaatggtgtttatagtgaacctcgccctattggaacccggtatctcacacgaaactcgtaa

SEQ ID NO: 3160 - DNA, 2212 bp, Artificial Sequence
  Synthetic polynucleotide
atggctgctgacggttatcttccagattggctcgaggacaacctttctgaaggcattcgtgagtggtgggctctgaaacctggagtccctcaacccaaagcgaaccaacaacaccaggacaaccgtcggggtcttgtgcttccgggttacaaatacctcggacccggtaacggactcgacaaaggagagccggtcaacgaggcggacgcggcagccctcgaacacgacaaagcttacgaccagcagctcaaggccggtgacaacccgtacctcaagtacaaccacgccgacgccgagtttcaggagcgtcttcaagaagatacgtcttttgggggcaaccttggcagagcagtcttccaggccaaaaagaggatccttgagcctcttggtctggttgagggagcagctaaaacggctcctggaaagaagaggcctgtagatcagtctcctcaggaaccggactcatcatctggtgttggcaaatcgggcaaacagcttgccagaaaaagactaaatttcggtcagactggcgactcagagtcagtcccagaccctcaacctctcggagaaccaccagcagcccccacaagtttgggatctaatacaatggcttcaggcggtggcgcaccaatggcagacaataacgagggtgccgatggagtgggtaattcctcaggaaattggcattgcgattcccaatggctgggcgacagagtcatcaccaccagcaccagaacctgggccctgcccacttacaacagccatctctacaagcaaatctccggccaatcaggagcttcaaacgacaaccactactttggctacagcaccccctgggggtattttgactttaacagattccactgccacttctcaccacgtgactggcagcgactcattaacaacaactggggattccggcccaagaaactcagcttcaagctcttcaacatccaagttaaagaggtcacgcagaacgatggcacgacgactattgccaataaccttaccagcacggttcaagtgtttacggactcggagtatcagctcccgtacgtgctcgggtcggcgcaccaaggctgtctcccgccgtttccagcggacgtcttcatggtccctcagtatggatacctcaccctgaacaacggaagtcaagcggtgggacgctcatccttttactgcctggagtacttcccttcgcagatgctaaggactggaaataacttccaattcagctataccttcgaggatgtaccttttcacagcagctacgctcacagccagagtttggatcgcttgatgaatcctcttattgatcagtatctgtactacctgaacagaacgcaaggaacaacctctggaacaaccaaccaatcacggctgctttttagccaggctgggcctcagtctatgtctttgcaggccagaaattggctacctgggccctgctaccggcaacagagactttcaaagactgctaacgacaacaacaacagtaactttccttggacagcggccagcaaatatcatctcaatggccgcgactcgctggtgaatcccaggaccagctatggccagtcacaaggacgatgaagaaaaatttttccctatgcacggcaatctaatatttggcaaagaagggacaacggcaagtaacgcagaattagataatgtaatgattacggatgaagaagagattcgtaccaccaatcctgtggcaacagagcagtatggaactgtggcaaataacttgcagagctcaaatacagctcccacgactagaactgtcaatgatcagggggccttacctggcatggtgtggcaagatcgtgacgtgtaccttcaaggacctatctgggcaaagattcctcacacggatggacactttcatccttctcctctgatgggaggctttggactgaaacatccgcctcctcaaatcatgatcaaaaatactccggtaccggcaaatcctccgacgactttcagcccggccaagtttgcttcatttatcactcagtactccactggacaggtcagcgtggaaattgagtgggagctacagaaagaaaacagcaaacgttggaatccagagattcagtacacttccaactacaacaagtctgttaatgtggactttactgtagacactaatggtgtttatagtgaacctcgccctattggaacccggtatctcacacgaaacttgtaa

SEQ ID NO: 3161 - DNA, 2212 bp, Artificial Sequence
  Synthetic polynucleotide
atggctgctgacggttatcttccagattggctcgaggacaacctttctgaaggcattcgtgagtggtgggctctgaaacctggagtccctcaacccaaagcgaaccaacaacaccaggacgaccgtcggggtcttgtgcttccgggttacaaatacctcggacccggtaacggactcgacaaaggagagccggtcaacgaggcggacgcggcagccctcgaacacgacaaagcttacgaccagcagctcaaggccggtgacaacccgtgcctcaagtacaaccacgccgacgccgagtttcaggagcgtcttcaagaagatacgtcttttgggggcaaccttggcagagcagtcttccaggccaaaaagaggatccttgagcctcttggtctggttgaggaagcagctaaaacggctcctggaaagaagaggcctgtagatcagtctcctcaggaaccggactcatcatctggtgttggcaaatcgggcaaacagcctgccagaaaaagactaaatttcggtcagactggcgactcagagtcagtcccagaccctcaacctctcggagaaccaccagcagcccccacaagtttgggatctaatacaatggcttcaggcggtagcgcaccaatggcagacaataacgagggtgccgatggagtgggtaattcctcaggaaattggcattgcgattcccaatggctgggcgacagagtcatcaccaccagcaccagaacctgggccctgcccacttacaacaaccatctctacaagcaaatctccagccaatcaggagcttcaaacgacaaccactactttggctacagcaccccttgggggtattttgactttaacagattccactgccacttctcaccacgtgactggcagcgactcattaacaacaactggggattccggcccaagaaactcagcttcaagctcttcaacatccaagttaaagaggtcacgcagaacgatggcacgacgactattgccaataaccttaccagcacggttcaagtgtttacggactcggagtatcagctcccgtacgtgctcgggtcggcgcaccaaggctgtctcccgccgtttccagcggacgtcttcatggtccctcagtatggatacctcaccctgaacaacggaagtcaagcggtgggacgctcatccttttactgcctggagtacttcccttcgcagatgctaaggactggaaataacttccaattcagctataccttcgaggatgtaccttttcacagcagctacgctcacagccagagtttggatcgcttgatggatcctcttattgatcagtatctgtactacctgaacagaacgcaaggaacaacctctggaacaaccaaccaatcacggctgctttttagccaggctgggcctcagtctatgtctttgcaggccagaaattggctacctgggccctgctaccggcaacagagactttcaaagactgctaacgacaacaacaacagtaactttccttggacagcggccagcaaatatcatctcaatggccgcgactcgctggtgaatccaggaccagctatggccagtcacaaaggacgatgaagaaaaatttttccctatgcacggcaatctaatatttggcaaagaagggacaacggcaagtaacgcagaattagataatgtaatgattacggatgaagaagagattcgtaccaccaatcctgtggcaacagagcagtatggaactgtggcaaataacttgcagagctcaaatacagctcccacgactagaactgtcaatgatcagggggccttacctggcatggtgtggcaagatcgtgacgtgtaccttcaaggacctatctgggcaaagattcctcacacggatggacactttcatccttctcctctgatgggaggctttggactgaaacatccgcctcctcaaatcatgatcaaaaatactccggtaccggcaaatcctccgacgactttcagcccggccaagtttgcttcatttatcactcagtactccactggacaggtcagcgtggaaattgagtgggagctacagaaagaaaacagcaaacgttggaatccagagattcagtacacttccaactacaacaagtctgttaatgtggactttactgtagacactaatggtgtttatagtgaacctcgccctattggaacccggtatctcacacgaaacctgtaa

SEQ ID NO: 3162 - DNA, 2211 bp, Artificial Sequence
  Synthetic polynucleotide
atggctgctgacggttatcttccagattggctcgaggacaacctttctgaaggcattcgtgagtggtgggctctgaaacctggagtccctcaacccaaagcgaaccaacaacaccaggacgaccgtcggggtcttgtgcttccgggttacaaatacctcggacccggtaacggactcgacaaaggagagccggtcaacgaggcggacgcggcagccctcgaacacgacaaagcttacgaccagcagctcaaggccggtgacaacccgtacctcaagtacaaccacgccgacgccgagtttcaggagcgtcttcaagaagatacgtcttttgggggcaaccttggcagagcagtcttccaggccaaaaagaggatccttgagcctcttggtctggttgaggaagcagctaaaacggctcctggaaagaagaggcctgtagatcagtctcctcaggaaccggactcatcatctggtgttggcaaatcgggcaaacagcctgccagaaaaagactaaatttcggtcagactggcgactcagagtcagtcccagaccctcaacctctcggagaaccaccagcagcccccacaagtttgggatctaatacaatggcttcaggcggtggcgcaccaatggcagacaataacgagggtgccgatggagtgggtaattcctcaggaaattggcattgcgattcccaatggctgggcaacagagtcatcaccaccagcaccagaacctgggccctgcccacttacaacaaccatctctacaagcaaatctccagccaatcaggagcttcaaacgacaaccactactttggctacagcaccccttgggggtattttgactttaacagattccactgccacttctcaccacgtgactggcagcgactcattaacaacaactggggattccggcccaagaaactcagcttcaagctcttcaacatccaagttaaagaggtcacgcagaacgatggcacgacgactattgccaataaccttaccagcacggttcaagtgtttacggactcggagtatcagctcccgtacgtgctcgggtcggcgcaccaaggctgtctcccgccgtttccagcggacgtcttcatggtccctcagtatggatacctcaccctgaacaacggaagtcaagcggtgggacgctcatccttttactgcctggagtacttcccttcgcagatgctaaggactggaaataacttccaattcagctataccttcgaggatgtaccttttcacagcagctacgctcacagccagagtttggatcgcttgatgaatcctcttattgatcagtatctgtactacctgaacagaacgcaaggaacaacctctggaacaaccaaccaatcacggctgctttttagccaggctgggcctcagtctatgtctttgcaggccagaaattggctacctgggccctgctaccggcaacagagactttcaaagactgctaacgacaacaacaacagtaactttccttggacagcggccagcaaatatcatctcaatggccgcgactcgctggtgaatccaggaccagctatggccagtcacaaggacgatgaagaaaaatttttccctatgcacggcaatctaatatttggcaaagaagggacaacggcaagtaacgcagaattagataatgtaatgattacggatgaagaagagattcgtaccaccaatcctgtggcaacagagcagtatggaactgtggcaaataacttgcagagctcaaatacagctcccacgactagaactgtcaatgatcagggggccttacctggcatggtgtggcaagatcgtgacgtgtaccttcaaggacctatctgggcaaagattcctcacacggatggacactttcatccttctcctctgatgggaggctttggactgaaacatccgcctcctcaaatcatgatcaaaaatactccggtaccggcaaatcctccgacgactttcagcccggccaagtttgcttcatttatcactcagtactccactggacaggtcagcgtggaaattgagtgggagctacagaaagaaaacagcaaacgttggaatccagagattcagtacacttccaactacaacaagtctgttaatgtggactttactgtagacactaatggtgtttatagtgaacctcgccctattggaacccggtatctcacacgaaacttgtaa

SEQ ID NO: 3163 - DNA, 2211 bp, Artificial Sequence
  Synthetic polynucleotide
atggctgctgacggttatcttccagattggctcgaggacaacctttctgaaggcattcgtgagtggtgggctctgaaacctggagtccctcaacccaaagcgaaccaacaacaccaggacgaccgtcggggtcttgtgcttccgggttacaaatacctcggacccggtaacggactcgacaaaggagagccggtcaacgaggcggacgcggcagccctcgaacacgacaaagcttacgaccagcagctcaaggccggtgacaacccgtacctcaagtacaaccacgccgacgccgagtttcaggagcgtcttcaagaagatacgtcttttgggggcaaccttggcagagcagtcttccaggccaaaaagaggatccttgagcctcttggtctggttgaggaagcagctaaaacggctcctggaaagaagaggcctgtagatcagtctcctcaggaaccggactcatcatctggtgttggcaaatcgggcaaacagcctgccagaaaaagactaaatttcggtcagactggcgactcagagtcagtcccagaccctcaacctctcggagaaccaccagcagcccccacaagtttgggatctaatacaatggcttcaggcggtggcgcaccaatggcggacaataacgagggtgccgatggagtgggtaattcctcaggaaattggcattgcgattcccaatggctgggcgacagagtcatcaccaccagcaccagaacctgggccctgcccacttacaacaaccatctctacaagcaaatctccagccaatcaggagcttcaaacgacaaccactactttggctacagcaccccttgggggtattttgactttaacagattccactgccacttctcaccacgtgactggcagcgactcattaacaacaactggggattccggcccaagaaactcagcttcaagctcttcaacatccaagttaaagaggtcacgcagaacgatggcacgacgactattgccaataaccttaccagcacggttcaagtgtttacggactcggagtatcagctcccgtacgtgctcgggtcggcgcaccaaggctgtctcccgccgtttccagcggacgtcttcatggtccctcagtatggatacctcaccctgaacaacggaagtcaagcggtgggacgctcatccttttactgcctggagtacttcccttcgcagatgctaaggactggaaataacttccaattcagctataccttcgaggatgtaccttttcacagcagctacgctcacagccagagtttggatcgcttgatgaatcctcttattgatcagtatctgtactacctgaacagaacgcaaggaacaacctctggaacaaccaaccaatcacggctgctttttagccaggctgggcctcagtctatgtctttgcaggccagaaattggctacctgggccctgctaccggcaacagagactttcaaagactgctaacgacaacaacaacagtaactttccttggacagcggccagcaaatatcatctcaatggccgcgactcgctggtgaatccaggaccagctatggccagtcacaaggacgatgaagaaaaatttttccctatgcacggcaatctaatatttggcaaagaagggacaacggcaagtaacgcagaattagataatgtaatgattacggatgaagaagagattcgtaccaccaatcctgtggcaacagtgcagtatggaactgtggcaaataacttgcagagctcaaatacagctcccacgactagaactgtcaatgatcagggggccttacctggcatggtgtggcaagatcgtgacgtgtaccttcaaggacctatctgggcaaagattcctcacacggatggacactttcatccttctcctctgatgggaggctttggactgaaacatccgcctcctcaaatcatgatcaaaaatactccggtaccggcaaatcctccgacgactttcagcccggccaagtttgcttcatttatcactcagtactccactggacaggtcagcgtggaaattgagtgggagctacagaaagaaaacagcaaacgttggaatccagagattcagtacacttccaactacaacaagtctgttaatgtggactttactgtagacactaatggtgtttatagtgaacctcgccctattggaacccggtatctcacacgaaacttgtaa

SEQ ID NO: 3164 - DNA, 2211 bp, Artificial Sequence
  Synthetic polynucleotide
atggctgctgacggttatcttccagattggctcgaggacaacctttctgaaggcattcgtgagtggtgggctctgaaacctggagtccctcaacccaaagcgaaccaacaacaccaggacaaccgtcggggtcttgtgcttccgggttacaaatacctcggacccggtaacggactcgacaaaggagagccggtcaacgaggcggacgcggcagccctcgaacacgacaaagcttacgaccagcagctcaaggccggtgacaacccgtacctcaagtacaaccacgccgacgccgagtttcaggagcgtcttcaagaagatacgtcttttgggggcaaccttggcagagcagtcttccaggccaaaaaggggatccttgagcctcttggtctggttgaggaagcagctaaaacggctcctggaaagaagaggcctgtagatcagtctcctcaggaaccggactcatcatctggtgttggcaaatcgggcaaacagcctgccagaaaaagactaaatttcggtcagactggcgactcagagtcagtcccagaccctcaacctctcggagaaccaccagcagcccccacaagtttgggatctaatacaatggcttcaggcggtggcgcaccaatggcagacaataacgagggtgccgatggagtgggtaattcctcaggaaattggcattgcgattcccaatggctgggcgacagagtcatcaccaccagcaccagaacctgggccctgcccacttacaacaaccatctctacaagcaaatctccagccaatcaggagcttcaaacgacaaccactactttggctacagcaccccttgggggtattttgactttaacagattccactgccacttctcaccacgtgactggcagcgactcattaacaacaactggggattccggcccaagaaactcagcttcaagctcttcaacatccaagttaaagaggtcacgcagaacgatggcacgacgactattgccaataaccttaccagcacggttcaagtgtttacggactcggagtatcagctcccgtacgtgttcgggtcggcgcaccaaggctgtctcccgccgtttccagcggacgtcttcatggtccctcagtatggatacctcaccctgaacaacggaagtcaagcggtgggacgctcatccttttactgcctggagtacttcccttcgcagatgctaaggactggaaataacttccaattcagctataccttcgaggatgtaccttttcacagcagctacgctcacagccagagttcggatcgcttgatgaatcctcttattgatcagtatctgtactacctgaacagaacgcaaggaacaacctctggaacaaccaaccaatcacggctgctttttagccaggctgggcctcagtctatgtctttgcaggccagaaattggctacctgggccctgctaccggcaacagagactttcaaagactgctaacgacaacaacaacagtaactttccttgaacagcggccagcaaatatcatctcaatggccgcgactcgctggtgaatccaggaccagctatggccagtcacaaggacgatgaagaaaaatttttccctatgcacggcaatctaatatttggcaaagaagggacaacggcaagtaacgcagaattagataatgtaatgattacggatgaagaagagattcgtaccaccaatcctgtggcaacagagcagtatggaactgtggcaaataacttgcagagctcaaatacagctcccacgactagaactgtcaatgatcagggggccttacctggcatggtgtggcaagatcgtgacgtgtaccttcaaggacctatctgggcaaagattcctcacacggatggacactttcatccttctcctctgatgggaggctttggactgaaacatccgcctcctcaaatcatgatcaaaaatactccggtaccggcaaatcctccgacgactttcagcccggccaagtttgcttcatttatcactcagtactccactggacaggtcagcgtggaaattgagtgggagctacagaaagaaaacagcaaacgttggaatccagagattcagtacacttccaactacaacaagtctgttaatgtggactttactgtagacactaatggtgtttatagtgaacctcgccctattggaacccggtatctcacacgaaacttgtaa

SEQ ID NO: 3165 - DNA, 2211 bp, Artificial Sequence
  Synthetic polynucleotide
atggctgctgacggttatcttccagattggctcgaggacaacctttctgaaggcattcgtgagtggtgggctctgaaacctggagtccctcaacccaaagcgaaccaacaacaccaggacaaccgtcggggtcttgtgcttccgggttacaaatacctcggacccggtaacggactcgacgaaggagagccggtcaacgaggcggacgcggcagccctcgaacacgacaaagcttacgaccagcagctcaaggccggtgacaacccgtacctcaagtacaaccacgccgacgccgagtttcaggagcgtcttcaagaagatacgtcttttgggggcaaccttggcagagcagtcttccaggccaaaaagaggatccttgagcctcttggtctggttgagggagcagctaaaacggctcctggaaagaagaggcctgtagatcagtctcctcaggaaccggactcatcatctggtgttggcaaatcgggcaaacagcctgccagaaaaagactaaatttcggtcagactggcgactcagagtcagtcccagaccctcaacctctcggagaaccaccagcagcccccacaagtttgggatctaatacaatggcttcaggcggtggcgcaccaatggcagacaataacgagggtgccgatggagtgggtaattcctcaggaaattggcattgcgattcccaatggctgggcgacagagtcatcaccaccagcaccagaacctgggccctgcccacttacaacagccacctctacaagcaaatctccagccaatcaggagcttcaaacgacaaccactactttggctacagcaccccttgggggtattttgactttaacagattccactgccacttctcaccacgtgactggcagcgactcattaacaacaactggggattccggcccaagaaactcagcttcaagctcttcaacatccaagttaaagaggtcacgcagaacgatggcacgacgactattgccaataaccttaccagcacggttcaagtgtttacggactcggagtatcagctcccgtacgtgctcgggtcggcgcaccaaggctgtctcccgccgtttccagcggacgtcttcatggtccctcagtatggatacctcaccctgaacaacggaagtcaagcggtgggacgctcatccttttactgcctggagtacttcccttcgcagatgctaaggactggaaataacttccaattcagctataccttcgaggatgtaccttttcacagcagctacgctcacagccagagtttggatcgcttgatgaatcctcttattgatcagtatctgtactacctgaacagaacgcaaggaacaacctctggaacaaccaaccaatcacggctgctttttagccaggctgggcctcagtctatgtctttgcaggccagaaattggctacctgggccctgctaccggcaacagagactttcaaagactgctaacgacaacaacaacagtaactttccttggacagcggccagcaaatatcatctcaatggccgcgactcgctggtgaatccaggaccagctatggccagtcacaaggacgatgaagaaaaatttttccctatgcacggcaatctaatatttggcaaagaagggacaacggcaagtaacgcagaattagataatgtaatgattacggatgaagaagagattcgtaccaccaatcctgtggcaacagagcagtatggaactgtggcaaataacttgcagagctcaaatacagctcccacgactagaactgtcaatgatcagggggccttacctggcatggtgtggcaagatcgtgacgtgtaccttcaaggacctatctgggcaaagattcctcacacggatggacactttcatccttctcctctgatgggaggctttggactgaaacatccgcctcctcaaatcatgatcaaaaatactccggtaccggcaaatcctccgacgactttcagcccggccaagtttgcttcatttatcactcagtactccactggacaggtcagcgtggaaattgagtgggagctacagaaagaaaacagcaaacgttggaatccagagattcagtacacttccaactacaacaagtctgttaatgtggactttactgtagacactaatggtgtttatagtgaacctcgccctattggaacccggtatctcacacgaaacttgtaa

SEQ ID NO: 3166 - DNA, 2211 bp, Artificial Sequence
  Synthetic polynucleotide
atggctgctgacggttatcttccagattggctcgaggacaacctttctgaaggcattcgtgagtggtgggctctgaaacctggagtccctcaacccaaagcgaaccaacaacaccaggacaaccgtcggggtcttgtgcttccgggttacaaatacctcggacccggtaacggactcgacaaaggagagccggtcaacgaggcggacgcggcagccctcgaacacgacaaagcttacgaccagcagctcaaggccggtgacaacccgtacctcaagtacaaccacgccgacgccgagtttcaggagcgtcttcaagaagatacgtcttttgggggcaaccttggcagagcagtcttccaggccaaaaagaggatccttgagcctcttggtctggttgagggagcagctaaaacggctcctggaaagaagaggcctgtagatcagtctcctcaggaaccggactcatcatctggtgttggcaaatcgggcaaacagcctgccagaaaaagactaaatttcggtcagactggcgactcagagtcagtcccagaccctcaacctctcggagaaccaccagcagcccccacaagtttgggatctaatacaatggcttcaggcggtggcgcaccaatggcagacaataacgagggtgccgatggagtgggtaattcctcaggaaattggcattgcgattcccaatggctgggcgacagagtcatcaccaccagcaccagaacctgggccctgcccacttacaacagccatctctacaagcaaatctccagccaatcaggagcttcaaacgacaaccactactttggctacagcaccccttggggtattttgactttaacagattccactgccacttctcaccacgtgactggcagcgactcattaacaacaactggggattccggcccaagaaactcagcttcaagctcttcaacatccaagttaaagaggtcacgcagaacgatggcacgacgactattgccaataaccttaccagcacggttcaagtgtttacggactcggagtatcagctcccgtacgtgctcgggtcggcgcaccaaggctgtctcccgccgtttccagcggacgccttcatggtccctcagtatggatacctcaccctgaacaacggaagtcaagcggtgggacgctcatccttttactgcctggagtacttcccttcgcagatgctaaggactggaaataacttccaattcagctataccctcgaggatgtaccttttcacagcagctacgctcacagccagagtttggatcgcttgatgaatcctcttattgatcagtatctgtactacctgaacagaacgcaaggaacaacctctggaacaaccaaccaatcacggctgctttttagccaggctgggcctcagtctatgtctttgcaggccagaaattggctacctgggccctgctaccggcaacagagactttcaaagactgctaacgacaacaacaacagtaactttccttggacagcggccagcaaatatcatctcaatggccgcgactcgctggtgaatccaggaccagctatggccagtcacaaaggacgatgaagaaaaatttttccctatgcacggcaatctaatatttggcaaagaagggacaacggcaagtaacgcagaattagatagtgtaatgattacggatgaagaagagattcgtaccaccaatcctgtggcaacagagcagtatggaactgtggcaaataacttgcagagctcaaatacagctcccacgactagaactgtcaatgatcagggggccttacctggcatggtgtggcaagatcgtgacgtgtaccttcaaggacctatctgggcaaagattcctcacacggatggacactttcatccttctcctctgatgggaggctttggactgaaacatccgcctcctcaaatcatgatcaaaaatactccggtaccggcaaatcctccgacgactttcagcccggccaagtttgcttcatttatcactcagtactccactggacaggtcagcgtggaaattgagtgggagctacagaaagaaaacagcaaacgttggaatccagagattcagtacacttccaactacaacaagtctgttaatgtggactttactgtagacactaatggtgtttatagtgaacctcgccctattggaacccggtatctcacacgaaacttgtaa

SEQ ID NO: 3167 - DNA, 2205 bp, Artificial Sequence
  Synthetic polynucleotide
atgactgacggttaccttccagattggctagaggacaacctctctgagggcgttcgagagtggtgggcgctgcaacctggagcccctaaacccaaggcaaatcaacaacatcaggacaacgctcggggtcttgtgcttccgggttacaaatacctcggacccggcaacggactcgacaagggggaacccgtcaacgcagcggacgcggcagccctcgagcacgacaaggcctacgaccagcagctcaaggccggtgacaacccctacctcaagtacaaccacgccgacgcggagttccagcagcggcttcagggcgacacatcgtttgggggcaacctcggcagagcagtcttccaggccaaaaagagggttcttgaacctcttggtctggttgagcaagcgggtgagacggctcctggaaagaagagaccgttgattgaatccccccagcagcccgactcctccacgggtatcggcaaaaaaggcaagcagccggctaaaaagaagctcgttttcgaagacgaaactggagcaggcgacggaccccctgagggatcaacttccggagccatgtctgatgacagtgagatgcgtgcagcaactggcggagctgcagtcgagggcggacaaggtgccgatggagtgggtaatgcctcgggtgattggcattgcgattccacctggtctgagggccacgtcacgaccaccagcaccagaacctgggtcttgcccacctacaacaaccacctctacaagcgactcggagagagcctgcagtccaacacctacaacggattctccaccccctggggatactttgacttcaaccgcttccactgccacttctcaccacgtgactggcagcgactcatcaacaacaactggggcatgcgacccaaagccatgcgggtcaaaatcttcaacatccaggtcaaggaggtcacgacgtcgaacggcgagacaacggtggctaataaccttaccagcacggttcagatctttgcggactcgtcgtacgaactgccgtacgtgatggatgcgggtcaagagggcagcctgcctccttttcccaacgacgtctttatggtgccccagtacggctactgtggactggtgaccggcaacacttcgcagcaacagactgacagaaatgccttctactgcctggagtactttccttcgcagatgctgcggactggcaacaactttgaaattacgtacagttttgagaaggtgcctttccactcgatgtacgcgcacagccagagcctggaccggctgatgaaccctctcatcgaccagtacctgtggggactgcaatcgaccaccaccggaaccaccctgaatgccgggactgccaccaccaactttaccaagctgcggcctaccaacctttccaactttaaaaagaactggctgcccgggccttcaatcaagcagcagggcttctcaaagactgccaatcaaaactacaagatccctgccaccgggtcagacagtctcatcaaatacgagacgcacagcactctggacggaagatggagtgccctgacccccggacctccaatggccacggctggacctgcggacagcaagttcagcaacagccagctcatctttgcggggcctaaacagaacggcaacacggccaccgtacccgggactctgatcttcacctctgaggaggagctggcagccaccaacgctaccgatacggacatgtggggcaacctacctggcggtgaccagagcaacagcaacctgccgaccgtggacagactgacagccttgggagccgtgcctggaatggtctggcaaaacagagacatttactaccagggtcccatttgggccaagattcctcataccgatggacactttcacccctcaccgctgattggtgggtttgggctgaaacacccgcctcctcaaatttttatcaagaacaccccggtacctgcgaatcctgcgacgaccttcagctctactccggtaaactccttcattactcagtacagcactggccaggtgtcggtgcagattgactgggagatccagaaggagcggtccaaacgctggaaccccgaggtccagtttacctccaactacggacagcaaaactctctgttgtgggctcccgatgcggctgggaaatacactgagcctagggctatcggtacccgctacctcacccaccacctgtaa

SEQ ID NO: 3168 - DNA, 2205 bp, Artificial Sequence
  Synthetic polynucleotide
atgactgacggttaccttccagattggctagaggacaacctctctgaaggcgttcgagagtggtgggcgctgcaacctggagcccctaaacccaaggcaaatcaacaacatcaggacaacgctcggggtcttgtgcttccgggttacaaatacctcggacccggcaacggactcgacaagggggaacccgtcaacgcagcggacgcggcagccctcgagcacgacaaggcctacgaccagcagctcaaggccggtgacaacccctacctcaagtacaaccacgccgacgcggagttccagcagcggcttcagggcgacacatcgtttgggggcaacctcggcagagcagtcttccaggccaaaaagagggttcttgaacctcttggtctggttgagcaagcgggtgagacggctcctggaaagaagagaccgttgattgaatccccccagcagcccgactcctccacgggtatcggcaaaaaaggcaagcagccggctaaaaagaagctcgttttcgaagacgaaactggagcaggcgacggaccccctgagggatcaacttccggagccatgtctgatgacagtgagatgcgtgcagcagctggcggagctgcagtcgagggcggacaaggtgccgatggagtgggtaatgcctcgggtgattggcattgcgattccacctggtctgagggccacgtcacgaccaccagcaccagaacctgggtcttgcccacctacaacaaccacctctacaagcgactcggagagagcctgcagtccaacacctacaacggattctccaccccctggggatactttgacttcaaccgcttccactgccacttcttaccacgtgactggcagcgactcatcaacaacaactggggcgtgcgacccaaagccatgcgggtcaaaatcttcaacatccaggtcaaggaggtcacgacgtcgaacggcgagacaacggtggctaataaccttaccagcacggttcagatctttgcggactcgtcgtacgaactgccgtacgtgatggatgcgggtcaagagggcagcctgcctccttttcccaacgacgtctttatggtgccccagtacggctactgtggactggtgaccggcgacacttcgcagcaacagactgacagaaatgccttctactgcctggagtactttccttcgcagatgctgcggactggcaacaactttgaaattacgtacagttttgagaaggtgcctttccactcgatgtacgcgcacagccagagcctggaccggctgatgaaccctctcatcgaccagtacctgtggggactgcaatcgaccaccaccggaaccaccctgaatgccgggactgccaccaccaactttaccaagctgcggcctaccaacttttccaactttaaaaagaactggctgcccgggccttcaatcaagcagcagggcttctcaaagactgccaatcaaaactacaagatccctgccaccgggtcagacagtctcatcaaatacgagacgcacagcactctggacggaagatggagtgccctgacccccggacctccaatggccacggctggacctgcggacagcaagttcagcaacagccagctcatctttgcggggcctaaacagaacggcaacacggccaccgtacccgggactctgatcttcacctctgaggaggagctggcagccaccaacgccaccgatacggacatgtggggcaacctacctggcggtgaccagagcaacagcaacctgccgaccgtggacagactgacagccttgggagccgtgcctggaatggtctggcaaaacagagacatttactaccagggtcccatttgggccaagattcctcataccgatggacactttcacccctcaccgctgattggtgggtttgggctgaaacacccgcctcctcaaatttttatcaagaacaccccggtacctgcgaatcctgcgacgaccttcagctctactccggtaaactccttcattactcagtacagcactggccaggtgtcggtgcagattgactgggagatccagaaggagcggtccaaacgctggaaccccgaggtccagtttacctccaactacggacagcaaaactctctgttgtgggctcccgatgcggctgggaaatacactgagcctagggctatcggtacccgctacctcacccaccacctgtaa

SEQ ID NO: 3169 - DNA, 2205 bp, Artificial Sequence
  Synthetic polynucleotide
atgactgacggttaccttccagattggctagaggacaacctctctgaaggcgttcgagagtggtgggcgctgcaacctggagcccctaaacccaaggcaaatcaacaacatcaggacaacgctcggggtcttgtgcttccgggttacaaatacctcggacccggcaacggactcgacgagggggaacccgtcaacgcagcggacgcggcagccctcgagcacgacaaggcctacgaccagcagctcaaggccggtgacaacccctacctcaagtacaaccacgccgacgcggagttccagcagcggcttcagggcgacacatcgtttgggggcaacctcggcagagcagtcttccaggccaaaaagagggttcttgaacctcttggtctggttgagcaagcgggtgagacggctcctggaaagaagagaccgttgattgaatccccccagcagcccgactcctccacgggtatcggcaaaaaaggcaagcagccggctaaaaagaagctcgttttcgaagacgaaactggagcaggcgacggaccccctgagggatcaacttccggagccatgtctgatgacagtgagatgcgtgcagcagctggcggagctgcagtcgagggcggacaaggtgccgatggagtgggtaatgcctcgggtgattggcattgcgattccacctggtctgagggccacgtcacgaccaccagcaccagaacctgggtcttgcccacctacaacaaccacctctacaagcgactcggagagagcctgcagtccaacacctacaacggattctccaccccctggggatactttgacttcaaccgcttccactgccacttctcaccacgtgactggcagcgactcatcaacaacaactggggcatgcgacccaaagccatgcgggtcaaaatcttcaacatccaggtcaaggaggtcacgacgtcgaacggcgagacaacggtggctaataaccttaccagcacggttcagatctttgcggactcgtcgtacgaactgccgtacgtgatggatgcgggtcaagagggcagcctgcctccttttcccaacgacgtctttatggtgccccagtacggctactgtggactggtgaccggcaacacttcgcagcaacagactgacagaaatgccttctactgcctggagtactttccttcgcagatgctgcggactggcaacaactttgaaattacgtacagttttgagaaggtgcctttccactcgatgtacgcgcacagccagagcctggaccggctgatgaaccctctcatcgaccagtacctgtggggactgcaatcgaccaccaccggaaccaccctgaatgccgggactgccaccaccaactttaccaagctgcggcctaccaacttttccaactttaaaaagaactggctgcccgggccttcaatcaagcagcagggcttctcaaagactgccaatcaaaactacaagatccctgccaccgggtcagacagtctcatcaaatacgagacgcacagcactctggacggaagatggagtgccctgacccccggacctccaatggccacggctggacctgcggacagcaagttcagcaacagccagctcatctttgcggggcctaaacagaacggcaacacggccaccgtacccgggactctgatcttcacctctgaggaggagctggcagccaccaacgctaccgatacggacatgtggggcaacctacctggcggtgaccagagcaacagcaacctgccgaccgtggacagactgacagccttgggagccgtgcctggaatggtctggcaaaacagagacatttactaccagggtcccatttgggccaagattcctcataccgatggacactttcacccctcaccgctgattggtgggtttgggctgaaacacccgcctcctcaaatttttatcaagaacaccccggtacctgcgaatcctgcgacgaccttcagctctactccggtaaactccttcattactcagtacagcactggccaggtgtcggtgcagattgactgggagatccagaaggagcggtccaaacgctggaaccccgaggtccagtttacctccaactacggacagcaaaactctctgttgtgggctcccgatgcggctgggaaatacactgagcctagggctatcggtacccgctacctcacccaccacctgtaa

SEQ ID NO: 3170 - DNA, 2205 bp, Artificial Sequence
  Synthetic polynucleotide
atgactgacggttaccttccagattggctagaggacaacctctctgaaggcgttcgagagtggtgggcgctgcaacctggagcccctaaacccaaggcaaatcaacaacatcaggacaacgctcggggtcttgtgcttccgggttacaaatacctcggacccggcaacggactcgacaagggggaacccgtcaacgcagcggacgcggcagccctcgagcacgacaaggcctacgaccagcagctcaaggccggtgacaacccctacctcaagtacaaccacgccgacgcggagttccagcagcggcttcagggcgacacatcgtttgggggcaacctcggcagagcagtcttccaggccaaaaagagggttcttgaacctcttggtctggttgagcaagcgggtgagacggctcctggaaagaagagaccgttgattgaatccccccagcagcccgactcctccacgggtatcggcaaaaaaggcaagcagccggctaaaaagaagctcgttttcgaagacggaactggagcaggcgacggaccccctgagggatcaacttccggagccatgtctgatgacagtgagatgcgtgcagcagctggcggagctgcagtcgagggcggacaaggtgccgatggagtgggtaatgcctcgggtgattggcattgcgattccacctggtctgagggccacgtcacgaccaccagcaccagaacctgggtcttgcccacctacaacaaccacctctacaagcgactcggagagagcctgcagtccaacacctacaacggattccccaccccctggggatactttgacttcaaccgcttccactgccacttctcaccacgtgactggcagcgactcatcaacaacaactggggcatgcgacccaaagccatgcgggtcaaaatcttcaacatccaggtcaaggaggtcacgacgtcgaacggcgagacaacggcggctaataaccttaccagcacggttcagatctttgcggactcgtcgtacgaactgccgtacgtgatggatgcgggtcaagagggcagcctgcctccttttcccaacgacgtctttatggtgccccagtacggctactgtggactggtgaccggcaacacttcgcagcaacagactgacagaaatgccttctactgcctggagtactttccttcgcagatgctgcggactggcaacaactttgaaattacgtacagttttgagaaggtgcctttccactcgatgtacgcgcacagccagagcctggaccggctgatgaaccctctcatcgaccagtacctgtggggactgcaatcgaccaccaccggaaccaccctgaatgccgggactgccaccaccaactttaccaagctgcggcctaccaacttttccaactttaaaaagaactggctgcccgggccttcaatcaagcagcagggcttctcaaagactgccaatcaaaactacaagatccctgccaccgggtcagacagtctcatcaaatacgagacgcacagcactctggacggaagatggagtgccctgacccccggacctccaatggccacggctggacctgcggacagcaagttcagcaacagccagctcatctttgcggggcctaaacagaacggcaacacggccaccgtacccgggactctgatcttcacctctgaggaggagctggcagccaccaacgccaccgatacggacatgtggggcaacctacctggcggtgaccagagcaacagcaacctgccgaccgtggacagactgacagccttgggagccgtgcctggaatggtctggcaaaacagagacatttactaccagggtcccatttgggccaagattcctcataccgatggacactttcacccctcaccgctgattggtgggtttgggctgaaacacccgcctcctcaaatttttatcaagaacaccccggtacctgcgaatcctgcgacgaccttcagctctactccggtaaactccttcattactcagtacagcactggccaggtgtcggtgcagattgactgggagatccagaaggagcggtccaaacgctggaaccccgaggtccagtttacctccaactacggacagcaaaactctctgttgtgggctcccgatgcggctgggaaatacactgagcctagggctatcggtacccgctacctcacccaccacctgtaa

SEQ ID NO: 3171 - DNA, 2205 bp, Artificial Sequence
  Synthetic polynucleotide
atgactgacggttaccttccagattggctagaggacaacctctctgaaggcgttcgagagtggtgggcgctgcaacctggagcccctaaacccaaggcaaatcaacaacatcaggacaacgctcggggtcttgtgcttccgggttacaaatacctcggacccggcaacggactcgacaagggggaacccgtcaacgcagcggacgcggcagccctcgagcacgacaaggcctacgaccagcagctcaaggccggtgacaacccctacctcaagtacaaccacgccgacgcggagttccagcagcggcttcagggcgacacatcgtttgggggcaacctcggcagagcagtcttccaggccaaaaagagggttcttgaacctcttggtctggttgagcaagcgggtgagacggctcctggaaagaagagaccgttgattgaatccccccagcagcccgactcctccacgggtatcggcaaaaaaggcaagcagccggctaaaaagaagctcgttttcgaagacgaaactggagcaggcgacggaccccctgagggatcaacttccggagccatgtctgatgacagtgagatgcgtgcagcagctggcggagctgcagtcgagggcggacaaggtgccgatggagtgggtaatgcctcgggtgattggcattgcgattccacctggtctgagggccacgtcacgaccaccagcaccagaacctgggtcttgcccacctacaacaaccacctctacaagcgactcggagagagcctgcagtccaacacctacaacggattctccaccccctggggatactttgacttcaaccgcttccactgccacttctcaccacgtgactggcagcgactcatcaacaacaactggggcatgcgacccaaagccatgcgggtcaaaatcttcaacatccaggtcaaggaggtcacgacgtcgaacggcgagacaacggtggctaataaccttaccagcacggttcagatctttgcggactcgtcgtacgaactgccgtacgtgatggatgcgggtcaagagggcagcctgcctccttttcccaacgacgtctttatggtgccccagtacggctaccgtggactggtgaccggcaacacttcgcagcaacagactgacagaaatgccttctactgcctggagtactttccttcgcagatgctgcggactggcaacaactttgaaattacgtacagttttgagaaggtgcctttccactcgatgtacgcgcacagccagagcctggaccggctgatgaaccctctcatcgaccagtacctgtggggactgcaatcgaccaccaccggaaccaccctgaatgccgggactgccaccaccaactttaccaagctgcggcctaccaacttttccaactttaaaaagaactggctgcccgggccttcaatcaagcagcagggcttctcaaagactgccaatcaaaactacaagatccctgccaccgggtcagacagtctcatcaaatacgagacgcacagcactctggacggaagatggagtgccctgacccccggacctccaatggccacggctggacctgcggacagcaagttcagcaacagccagctcatctttgcggggcctaaacagaacggcaacacggccaccgtacccgggactctgatcttcacctctgaggaggagctggcagccaccaacgccaccgatacggacatgtggggcaacctacctggcggtgaccagagcaacagcaacctgccgaccgtggacagactgacagccttgggagccgtgcctggaatggtctggcaaaacagagacatttactaccagggtcccatttgggccaagattcctcataccgatggacactttcacccctcaccgctgattggtgggtttgggctgaaacacccgcctcctcaaatttttatcaagaacaccccggtacctgcgaatcctgcgacgaccttcagctctactccggtaaactccttcattactcagtacagcactggccaggtgtcggtgcagattgactgggagatccagaaggagcggtccaaacgctggaaccccgaggtccagtttacctccaactacggacagcaaaactctctgttgtgggctcccgatgcggctgggaaatacactgagcctagggctatcggtacccgctacctcacccaccacctgtaa

SEQ ID NO: 3172 - DNA, 2205 bp, Artificial Sequence
  Synthetic polynucleotide
atgactgacggttaccttccagattggctagaggacaacctctctgaaggcgttcgagagtggtgggcgctgcaacctggagcccctaaacccaaggcaaatcaacaacatcaggacaacgctcggggtcttgtgcttcagggttacaaatacctcggacccggcaacggactcgacaagggggaacccgtcaacgcagcggacgcggcagccctcgagcacgacaaggcctacgaccagcagctcaaggccggtgacaacccctacctcaagtacaaccacgccgacgcggagttccagcagcggcttcagggcgacacatcgtttgggggcaacctcggcagagcagtcttccaggccaaaaagagggttcttgaaccccttggtctggttgagcaagcgggtgagacggctcctggaaagaagagaccgttgattgaatccccccagcagcccgactcctccacgggtatcggcaaaaaaggcaagcagccggctaaaaagaagctcgttttcgaagacgaaactggagcaggcgacggaccccctgagggatcaacttccggagccatgtctgatgacagtgagatgcgtgcagcagctggcggagctgcagtcgagggcggacaaggtgccgatggagtgggtaatgcctcgggtgattggcattgcgattccacccggtctgagggccacgtcacgaccaccagcaccagaacctgggtcttgcccacctacaacaaccacctctacaagcgactcggagagagcctgcagtccaacacctacaacggattctccaccccctggggatactttgacttcaaccgcttccactgccacttctcaccacgtgactggcagcgactcatcaacaataactggggcatgcgacccaaagccatgcgggtcaaaatcttcaacatccaggtcaaggaggtcacgacgtcgaacggcgagacaacggtggctaataaccttaccagcacggttcagatctttgcggactcgtcgtacgaactgccgtacgtgatggatgcgggtcaagagggcagcctgcctccttttcccaacgacgtctttatggtgccccagtacggctactgtggactggtgaccggcaacacttcgcagcaacagactgacagaaatgccttctactgcctggagtactttccttcgcagatgctgcggactggcaacaactttgaaattacgtacagttttgagaaggtgcctttccactcgatgtacgcgcacagccagagcctggaccggctgatgaaccctctcatcgaccagtacctgtggggactgcaatcgaccaccaccggaaccaccctgaatgccgggactgccaccaccaactttaccaagctgcggcctaccaacttttccaactttaaaaagaactggctgcccgggccttcaatcaagcagcagggcttctcaaagactgccaatcaaaactacaagatccctgccaccgggtcagacagtctcatcaaatacgagacgcacagcactctggacggaagatggagtgcccggacccccggacctccaatggccacggctggacctgcggacagcaagttcagcaacagccagctcatctttgcggggcctaaacagaacggcaacacggccaccgtacccgggactctgatcttcacctctgaggaggagctggcagccaccaacgccaccgatacggacatgtggggcaacctacctggcggtgaccagagcaacagcaacctgccgaccgtggacagactgacagccttgggagccgtgcctggaatggtctggcaaaacagagacatttactaccagggtcccatttgggccaagattcctcataccgatggacactttcacccctcaccgctgattggtgggtttgggctgaaacacccgcctcctcaaatttttatcaagaacaccccggtacctgcgaatcctgcgacgaccttcagctctactccggtaaactccttcattactcagtacagcactggccaggtgtcggtgcagattgactgggagatccagaaggagcggtccaaacgctggaaccccgaggtccagtttacctccaactacggacagcaaaactctctgttgtgggctcccgatgcggctgggaaatacactgagcctagggctatcggtacccgctacctcacccaccacctgtaa

SEQ ID NO: 3173 - DNA, 2175 bp, Artificial Sequence
  Synthetic polynucleotide
atgtcttttgttgatcaccctccagattggttggaagaagttggtgaaggtcttcgcgagtttttgggccttgaagcgggcccaccgaaaccaaaacccaatcagcagcatcaagatcaagcccgtggtcttgtgctgcctggttataactatctcggacccggaaacggtctcgatcgaggagagcctgtcaacagggcagacgaggtcgcgcgagagcacgacatctcgtacaacgagcagcttgaggcgggagacaacccctacctcaagtacaaccacgcggacgccgagtttcaggagaggctcgccgacgacacatccttcgggggaaacctcggaaaggcagtctttcaggccaagaaaagggttctcgaaccttttggcctggttgaagagggtgctaagacggcccctaccggaaagcggatagacgaccactttccaaaaagaaagaaggcccggaccgaagaggactccaagccttccacctcgtcagacgccgaagctggacccagcggatcccagcagctgcaaatcccagcccaaccagcctcaagtttgggagctgatacaatgtctgcgggaggtggcggcccattgggcgacaataaccaaggtgccgatggagtgggcaatgcctcgggagattggcattgcgattccacgtggatgggggacagagtcgtcaccaagtccacccgaacctgggtgctgcccagctacaacaaccaccagtaccgagagatcaaaagcggctccgtcgacggaagcaacgccaacgcctactttggatacagcaccccctgggggtactttgactttaaccgcttccacagccactggagcccccgagactggcaaagactcatcaacaactactggggcttcagaccccggtccctcagagtcaaaatcttcaacattcaagtcaaagaggtcacggtgcaggactccaccaccaccatcgccaacaacctcacctccaccgtccaagtgtttacggacgacgactaccagctgccctacgtcgtcggcaacgggaccgagggatgcctgccggccttccctccgcaggtctttacgctgccgcagtacggttacgcgacgctgaaccgcgacaacacagaaaatcccaccgagaggagcagcttcttctgcctagagtactttcccagcaagatgctgagaacgggcaacaactttgagtttacctacaactttgaggaggtgcccttccactccagcttcgctcccagtcagaacctcttcaagctggccaacccgctggtggaccagtacttgtaccgcttcgtgagcacaaataacactggcggagtccagttcaacaagaacctggccgggagatacgccaacacctacaaaaactggttcccggggcccatgggccgaacccagggctggaacctgggctccggggtcaaccgcgccagtgtcagcgccttcgccacgaccaataggatggagctcgagggcgcgagttaccaggtgcccccgcagccgaacggcatgaccaacaacctccagggcagcaacacctatgccctggagaacactatgatcttcaacagccagccggcgaacccgggcaccaccgccacgtacctcgagggcaacatgctcatcaccagcgagagcgagacgcagccggtgaaccgcgtggcgtacaacgtcggcgggcagatggccaccaacaaccagagctccaccactgcccccgcgaccggcacgtacaacctccaggaaatcgtgcccggcagcgtgtggatggagagggacgtgtacctccaaggacccatctgggccaagatcccagagacggaggcgcactttcacccctctccggccatgggcggattcggactcaaacacccaccgcccatgatgctcatcaagaacacgcctgtgcccggaaatatcaccagcttctcggacgtgcccgtcagcagcttcatcacccagtacagcaccgggcaggtcaccgtggagatggagtgggagctcaagaaggaaaactccaagaggtggaacccagagatccagtacacaaacaactacaacgacccccagtttgtggactttgccccggacagcaccggggaatacagaaccaccagacctatcggaacccgataccttacccgacccctttaa

SEQ ID NO: 3174 - DNA, 2175 bp, Artificial Sequence
  Synthetic polynucleotide
atgtcttttgttgatcaccctccagattggttggaagaagttggtgaaggtcttcgcgagtttttgggccttgaagcgggcccaccgaaaccaaaacccaatcagcagcatcaagatcaagcccgtggtcttgtgctgcctggttataactatctcggacccggaaacggtctcgatcgaggagagcctgtcaacagggcagacgaggtcgcgcgagagcacgacatctcgtacaacgagcagcttgaggcgggagacaacccctacctcaagtacaaccacgcggacgccgagtttcaggagaagctcgccgacgacacatcctccgggggaaacctcggaaaggcagtctttcaggccaagaaaagggttctcgaaccttttggcctggttgaagagggtgctaagacggcccctaccggaaagcggatagacgaccactttccaaaaagaaagaaggcccggaccgaagaggactccaagccttccacctcgtcagacgccgaagctggacccagcggatcccagcagctgcaaatcccagcccaaccagcctcaagtttgggagctgatacaatgtctgcgggaggtggcggcccattgggcgacaataaccaaggtgccgatggagtgggcaatgcctcgggagattggcattgcgattccacgtggatgggggacagagtcgtcaccaagtccacccgaacctgggtgctgcccagctacaacaaccaccagtaccgagagatcaaaagcggctccgtcgacggaagcaacgccaacgcctactttggatacagcaccccctgggggtactttgactttaaccgcttccacagccactggagcccccgagactggcaaagactcatcaacaactactggggcttcagaccccggtccctcagagtcaaaatcttcaacattcaagtcaaagaggtcacggtgcaggactccaccaccaccatcgccaacaacctcacctccaccgtccaagtgtttacggacgacgactaccagctgccctacgtcgtcggcaacgggaccgagggatgcctgccggccttccctccgcaggtctttacgctgccgcagtacggttacgcgacgctgaaccgcgacaacacagaaaatcccaccgagaggagcagcttcttctgcctagagtactttcccagcaagatgctgagaacgggcaacaactttgagtttacctacaactttgaggaggtgcccttccactccagcttcgctcccagtcagaacctcttcaagctggccaacccgctagtggaccagtacttgtaccgcttcgtgagcacaaataacactggcggagtccagttcaacaagaacctggccgggagatacgccaacacctacaaaaactggttcccggggcccatgggccgaacccagggctggaacctgggctccggggtcaaccgcgccagtgtcagcgccttcgccacgaccaataggatggagctcgagggcgcgagttaccaggtgcccccgcagccgaacggcatgaccaacaacctccagggcagcaacacctatgccctggagaacactatgatcttcaacagccagccggcgaacccgggcaccaccgccacgtacctcgagggcaacatgctcatcaccagcgagagcgagacgcagccggtgaaccgcgtggcgtacaacgtcggcgggcagatggccaccaacaaccagagctccaccactgcccccgcgaccggcacgtacaacctccaggaaatcgtgcccggcagcgtgtggatggagagggacgtgtacctccaaggacccatctgggccaagatcccagagacgggggcgcactttcacccctctccggccatgggcggattcggactcaaacacccaccgcccatgatgctcatcaagaacacgcctgtgcccggaaatatcaccagcttctcggacgtgcccgtcagcagcttcatcacccagtacagcaccgggcaggtcaccgtggagatggagtgggagctcaagaaggaaaactccaagaggtggaacccagagatccagtacacaaacaactacaacgacccccagtttgtggactttgccccggacagcaccggggaatacagaaccaccagacctatcggaacccgataccttacccgacccctttaa

SEQ ID NO: 3175 - DNA, 2175 bp, Artificial Sequence
  Synthetic polynucleotide
atgtcttttgttgatcaccctccagattggttggaagaagttggtgaaggtcttcgcgagtttttgggccttgaagcgggcccaccgaaaccaaaacccaatcagcagcatcaagatcaagcccgtggtcttgtgctgcctggttataactatctcggacccggaaacggtctcgatcgaggagagcctgtcaacagggcagacgaggtcgcgcgagagcacgacatctcgtacaacgagcagcttgaggcgggagacaacccctacctcaagtacaaccacgcggacgccgagtttcaggagaagctcgccgacgacacatccttcgggggaaacctcggaaaggcagtctttcaggccaagaaaagggttctcgaaccttttggcctggttgaagagggtgctaagacggcccctaccggaaagcggatagacgaccactttccaaaaagaaagaaggcccggaccgaagaggactccaagccttccacctcgtcagacgccgaagctggacccagcggatcccagcagctgcaaatcccagcccaaccagcctcaagtttgggagctgatacaatgtctgcgggaggtggcggcccattgggcgacaataaccaaggtgccgatggagtgggcaatgcctcgggagattggcattgcgattccacgtggatgggggacagagtcgtcaccaagtccacccgaacctgggtgctgcccagctacaacaaccaccagtaccgagagatcaaaagcggctccgtcgacggaagcaacgccaacgcctactttggatacagcaccccctgggggtactttgactttaaccgcttccacagccactggagcccccgagactggcaaagactcatcaacaactactggggcttcagaccccggtccctcagagtcaaaatcttcaacattcaagtcaaagaggtcacggtgcaggactccaccaccaccatcgccaacaacctcacctccaccgtccaagtgtttacggacgacgactaccagctgccctacgtcgtcggcaacgggaccgagggatgcctgccggccttccctccgcaggtctttacgctgccgcagtacggttacgcgacactgaaccgcgacaacacagaaaatcccaccgagaggagcagcttcttctgcctagagtactttcccagcaagatgctgagaacgggcaacaactttgagtttacctacaactttgaggaggtgcccttccactccagcttcgctcccagtcagaacctcttcaagctggccaacccgctggtggaccagtacttgtaccgcttcgtgagcacaaataacactggcggagtccagttcaacaagaacctggccgggagatacgccaacacctacaaaaactggttcccggggcccatgggccgaacccagggctggaacctgggctccggggtcaaccgcgccagtgtcagcgccttcgccacgaccaataggatggagctcgagggcgcgagttaccaggtgcccccgcagccgaacggcatgaccaacaacctccagggcagcaacacctatgccctggagaacactatgatcttcaacagccagccggcgaacccgggcaccaccgccacgtacctcgagggcaacatgctcatcaccagcgagagcgagacgcagccggtgaaccgcgtggcgtacaacgtcggcgggcagatggccaccaacaaccagagctccaccactgcccccgcgaccggcacgtacaacctccaggaaatcgtgcccggcagcgtgtggatggagagggacgtgtacctccaaggacccatctgggccaagatcccagagacgggggcgcactttcacccctctccggccatgggcggattcggactcaaacacccaccgcccatgatgctcatcaagagcacgcctgtgcccggaaatatcaccagcttctcggacgtgcccgtcagcagcttcatcacccagtacagcaccgggcaggtcaccgtggagatggagtgggagctcaagaaggaaaactccaagaggtggaacccagagatccagtacacaaacaactacaacgacccccagtttgtggactttgccccggacagcaccggggaatacagaaccaccagacctatcggaacccgataccttacccgacccctttaa

SEQ ID NO: 3176 - DNA, 2175 bp, Artificial Sequence
  Synthetic polynucleotide
atgtcttttgttgatcaccctccagattggttggaagaagttggtgaaggtcttcgcgagtttttgggccctgaagcgggcccaccgaaaccaaaacccaatcagcagcatcaagatcaagcccgtggtcttgtgctgcctggttataactatctcggacccggaaacggtctcgatcgaggagagcctgtcaacagggcagacgaggtcgcgcgagagcacgacatctcgtacaacgagcagcttgaggcgggagacaacccctacctcaagtacaaccacgcggacgccgagtttcaggagaagctcgccgacgacacatccttcgggggaaacctcggaaaggcagtctttcaggccaagaaaagggttctcgaaccttttggcctggttgaagagggtgctaagacggcccctaccggaaagcggatagacgaccactttccaaaaagaaagaaggtccggaccgaagaggactccaagccttccacctcgtcagacgccgaagctggacccagcggatcccagcagctgcaaatcccagcccaaccagcctcaagtttgggagctgatacaatgtctgcgggaggtggcggcccattgggcgacaataaccaaggtgccgatggagtgggcaatgcctcgggagattggcattgcgattccacgtggatgggggacagagtcgtcaccaagtccacccgaacctgggtgccgcccagctacaacaaccaccagtaccgagagatcaaaagcggctccgtcgacggaagcaacgccaacgcctactttggatacagcaccccctgggggtactttgactttaaccgcttccacagccactggagcccccgagactggcaaagactcatcaacaactactggggcttcagaccccggtccctcagagtcaaaatcttcaacattcaagtcaaagaggtcacggtgcaggactccaccaccaccatcgccaacaacctcacctccaccgtccaagtgtttacggacgacgactaccagctgccctacgtcgtcggcaacgggaccgagggatgcctgccggccttccctccgcaggtctttacgctgccgcagtacggttacgcgacgctgaaccgcgacaacacagaaaatcccaccgagaggagcagcttcttctgcctagagtactttcccagcaagatgctgagaacgggcaacaactttgagtttacctacaactttgaggaggtgcccttccactccagcttcgctcccagtcagaacctcttcaagctggccaacccgctggtggaccagtacttgtaccgcttcgtgagcacaaataacactggcggagtccagttcaacaagaacctggccgggagatacgccaacacctacaaaaactggttcccggggcccatgggccgaacccagggctggaacctgggctccggggtcaaccgcgccagtgtcagcgccttcgccacgaccaataggatggagctcgagggcgcgagttaccaggtgcccccgcagccgaacggcatgaccaacaacctccagggcagcaacacctatgccctggagaacactatgatcttcaacagccagccggcgaacccgggcaccaccgccacgtacctcgagggcaacatgctcatcaccagcgagagcgagacgcagccggtgaaccgcgtggcgtgcaacgtcggcgggcagatggccaccaacaaccagagctccaccactgcccccgcgaccggcacgtacaacctccaggaaatcgtgcccggcagcgtgtggatggagagggacgtgtacctccaaggacccatctgggccaagatcccagagacgggggcgcactttcacccctctccggccatgggcggattcggactcaaacacccaccgcccatgatgctcatcaagaacacgcctgtgcccggaaatatcaccagcttctcggacgtgcccgtcagcagcttcatcacccagtacagcaccgggcaggtcaccgtggagatggagtgggagctcaagaaggaaaactccaagaggtggaacccagagatccagtacacaaacaactacaacgacccccagtttgtggactttgccccggacagcaccggggaatacagaaccaccagacctattggaacccgataccttacccgacccctttaa

SEQ ID NO: 3177 - DNA, 2175 bp, Artificial Sequence
  Synthetic polynucleotide
atgtcttttgttgatcaccctccagattggttggaagaagttggtgaaggtcttcgcgagtttttgggccttgaagcgggcccaccgaaaccaaaacccaatcagcagcatcaagatcaagcccgtggtcttgtgctgcctggttataactatctcggacccggaaacggtctcgatcgaggagagcctgtcaacagggcagacgaggtcgcgcgagagcacgacatctcgtacaacgagcagcttgaggcgggagacaacccctacctcaagtacaaccacgcggacgccgagtttcaggagaagctcgccgacgacacatccttcgggggaaacctcggaaaggcagtctttcaggccaagaaaagggttctcgaaccttttggcctggttgaagagggtgctaagacggcccctaccggaaagcggatagacgaccactttccaaaaagaaagaaggcccggaccgaagaggactccaagccttccacctcgtcagacgccgaagctggacccagcggatcccagcagctgcaaatcccagcccaaccagcctcaagtttgggagctgatacaatgtctgcgggaggtggcggcccattgggcgacaataaccaaggtgccgatggagtgggcaatgcctcgggagattggcattgcgattccacgtggatgggggacagagtcgtcaccaagtccacccgaacctgggtgctgcccagctacaacaaccaccagtaccgagagatcaaaagcggctccgtcgacggaagcaacgccaacgcctactttggatacagcaccccctgggggtactttgactttaaccgcttccacagccactggagcccccgagactggcaaagactcatcaacaactactggggcttcagaccccggtccctcagagtcaaaatcttcaacattcaagtcaaagaggtcacggtgcaggactccaccaccaccatcgccaacaacctcacctccaccgtccaagtgtttacggacgacgactaccagctgccctacgtcgtcggcaacgggaccgagggatgcctgccggccttccctccgcaggtctttacgctgccgcagtacggttacgcgacgctgaaccgcgacaacaccgaaaatcccaccgagaggagcagcttcttctgcctagagtactttcccagcaagatgctgagaacgggcaacaactttgagtttacctacaactttgaggaggtgcccttccactccagcttcgctcccagtcagaacctcttcaagctggccaacccgctggtggaccagtacttgtaccgcttcgtgagcacaaataacactggcggagtccagttcaacaagaacctggccgggagatacgccaacacctacaaaaactggttcccggggcccatgggccgaacccagggctggaacctgggctccggggtcaaccgcgccagtgtcagcgccttcgccacgaccaataggatggagctcgagggcgcgagttaccaggtgcccccgcagccgaacggcatgaccaacaacctccagggcagcaacacctatgccctggagaacactatgatcttcaacagccagccggcgaacccgggcaccaccgccacgtacctcgagggcaacatgctcatcaccagcgagagcgagacgcagccggtgaaccgcgtggcgtacaacgtcggcgggcagatggccaccaacaaccagagctccaccactgcccccgcgaccggcgcgtacaacctccaggaaatcgtgcccggcagcgtgtggatggagagggacgtgtacctccaaggacccatctgggccaagatcccagagacgggggcgcactttcacccctctccggccatgggcggattcggactcaaacacccaccgcccatgatgctcatcaagaacacgcctgtgcccggaaatatcaccagcttctcggacgtgcccgtcagcagcttcatcacccagtacagcaccgggcaggtcaccgtggagatggagtgggagctcaagaaggaaaactccaagaggtggaacccagagatccagtacacaaacaactacaacgacccccagtttgtggactttgccccggacagcaccggggaatacagaaccaccagacctatcggaacccgataccttacccgacccctttaa

SEQ ID NO: 3178 - DNA, 2175 bp, Artificial Sequence
  Synthetic polynucleotide
atgtcttttgttgatcaccctccagattggttggaagaagttggtgaaggtcttcgcgagtttttgggccttgaagcgggcccaccgaaaccaaaacccaatcagcagcatcaagatcaagcccgtggtcttgtgctgcctggttataactatctcggacccggaaacggtctcgatcgaggagagcctgtcaacagggcagacggggtcgcgcgagagcacgacatctcgtacaacgagcagcttgaggcgggagacaacccctacctcaagtacaaccacgcggacgccgagtttcaggagaagctcgccgacgacacatccttcgggggaaacctcggaaaggcagtctttcaggccaagaaaagggttctcgaaccttttggcctggttgaagagggtgctaagacggcccctaccggaaagcggatagacgaccactttccaaaaagaaagaaggcccggaccgaagaggactccaagccttccacctcgtcagacgccgaagctggacccagcggatcccagcagctgcaaatcccagcccaaccagcctcaagtttgggagctgatacaatgtctgcgggaggtggcggcccattgggcgacaataaccaaggtgccgatggagtgggcaatgcctcgggagattggcattgcgattccacgtggatgggggacagagtcgtcaccaagtccacccgaacctgggtgctgcccagctacaacaaccaccagtaccgagagatcaaaagcggctccgtcgacggaagcaacgccaacgcctactttggatacagcaccccctgggggtactttgactttaaccgcttccacagccactggagcccccgagactggcaaagactcatcaacaactactggggcttcagaccccggtccctcagagtcaaaatcttcaacattcaagtcaaagaggtcacggtgcaggactccaccaccaccatcgccaacaacctcacctccaccgtccaagcgtttacggacgacgactaccagctgccctacgtcgtcggcaacgggaccgagggatgcctgccggccttccctccgcaggtctttacgctgccgcagtacggttacgcgacgctgaaccgcgacaacacagaaaatcccaccgagaggagcagcttcttctgcctagagtactttcccagcaagatgctgagaacgggcaacaactttgagtttacctacaactttgaggaggtgcccttccactccagcttcgctcccagtcagaacctcttcaagctggccaacccgctggtggaccagtacttgtaccgcttcgtgagcacaaataacactggcggagtccagttcaacaagaacctggccgggagatacgccaacacctacaaaaactggttcccggggcccatgggccgaacccagggctggaacctgggctccggggtcaaccgcgccagtgtcagcgccttcgccacgaccaataggatggagctcgagggcgcgagttaccaggtgcccccgcagccgaacggcatgaccaacaacctccagggcagcaacacctatgccctggagaacactatgatcttcaacagccagccggcgaacccgggcaccaccgccacgtacctcgagggcaacatgctcatcaccagcgagagcgagacgcagccggtgaaccgcgtggcgtacaacgtcggcgggcagatggccaccaacaaccagagctccaccactgcccccgcgaccggcacgtacaacctccaggaaatcgtgcccggcagcgtgtggatggagagggacgtgtacctccaaggacccatctgggccaagatcccagagacgggggcgcactttcacccctctccggccatgggcggattcggactcaaacacccaccgcccatgatgctcatcaagaacacgcctgtgcccggaaatatcaccagcttctcggacgtgcccgtcagcagcttcatcacccagtacagcaccgggcaggtcaccgtggagatggagtgggagctcaagaaggaaaactccaagaggtggaacccagagatccagtacacaaacaactacaacgacccccagtttgtggactttgccccggacagcaccggggaatacagaaccaccagacctatcggaacccgataccttacccgacccctttaa

SEQ ID NO: 3179 - DNA, 2175 bp, Artificial Sequence
  Synthetic polynucleotide
atgtcttttgttgatcaccctccagattggttggaagaagttggtgaaggtcttcgcgagtttttgggccttgaagcgggcccaccgaaaccaaaacccaatcagcagcatcaagatcaagcccgtggtcttgtgctgcctggttataactatctcggacccggaaacggtctcgatcgaggagagcctgtcaacagggcagacgaggtcgcgcgagagcacgacatctcgtacaacgagcagcttgaggcgggagacaacccctacctcaagtacaaccacgcggacgccgagtttcaggagaagctcgccgacgacacatccttcgggggaaacctcggaaaggcagtctttcaggccaagaaaagggttctcgaaccttttggcctggttgaagagggtgctaagacggcccctaccggaaagcggatagacgaccactttccaaaaagaaagaaggcccggaccgaagaggactccaagccttccacctcgtcagacgccgaagctggacccagcggatcccagcagctgcaaatcccagcccaaccagcctcaagtttgggagctgatacaatgtctgcgggaggtggcggcccattgggcgacaataaccaaggtgccgatggagtgggcaatgcctcgggagattggcattgcgattccacgtggatgggggacagagtcgtcaccaagtccacccgaacctgggtgctgcccagctacaacaaccaccagtaccgagagatcaaaagcggctccgtcgacggaagcaacgccaacgcctactttggatacagcaccccctgggggtactttgactttaaccgcttccacagccactggagcccccgagactggcaaagactcatcaacaactactggggcttcagaccccggtccctcagagtcaaaatcttcaacattcaagtcaaagaggtcacggtgcaggactccaccaccaccatcgccaacaacctcacctccaccgtccaagtgtttacggacgacgactaccagctgccctacgtcgtcggcaacgggaccgagggatgcctgccggccttccctccgcaggtctttacgctgccgcagtacggttacgcgacgctgaaccgcgacaacacagaaaatcccaccgagaggagcagcttcttctgcctagagtactttcccagcaagatgctgagaacgggcaacaactttgagtttacctacaactttgaggaggtgcccttccactccagcttcgctcccagtcagaacctcttcaagctggccaacccgctggtggaccagtacttgtaccgcttcgtgagcacaaataacactggcggagtccagttcaacaagaacctggccgggagatacgccaacacctacaaaaactggttcccggggcccatgggccgaacccagggctggaacctgggctccggggtcaaccgcgccagtgtcagcgccttcgccacgaccaataggatggagctcgagggcgcgagttactaggtgcccccgcagccgaacggcatgaccaacaacctccagggcagcaacacctatgccctggagaacactatgatcttcaacagccagccggcgaacccgggcaccaccgccacgtacctcgagggcaacatgctcatcaccagcgagagcgagacgcagccggtgaaccgcgtggcgtacaacgtcggcgggcagatggccaccaacaaccagagctccaccactgcccccgcgaccggcacgtacaacctccaggaaatcgtgcccggcagcgtgtggatggagggggacgtgtacctccaaggacccatctgggccaagatcccagagacgggggcgcactttcacccctctccggccatgggcggattcggactcaagcacccaccgcccatgatgctcatcaagaacacgcctgtgcccggaaatatcaccagcttctcggacgtgcccgtcagcagcttcatcacccagtacagcaccgggcaggtcaccgtggagatggagtgggagctcaagaaggaaaactccaagaggtggaacccagagatccagtacacaaacaactacaacgacccccagtttgtggactttgccccggacagcaccggggaatacagaaccaccagacctatcggaacccgataccttacccgacccctttaa

SEQ ID NO: 3180 - DNA, 2175 bp, Artificial Sequence
  Synthetic polynucleotide
atgtcttttgttgatcaccctccagattggttggaagaagttggtgaaggtcttcgcgagtttttgggccttgaagcgggcccaccgaaaccaaaacccaatcagcagcatcaagatcaagcccgtggtcttgtgctgcctggttataactatctcggacccggaaacggtctcgatcgaggagagcctgtcaacagggcagacgaggtcgcgcgagagcacgacatctcgtacaacgagcagcttgaggcgggagacaacccctacctcaagtacaaccacgcggacgccgagtttcaggagaagctcgccgacgacacatccttcgggggaaacctcggaaaggcagtctttcaggccaagaaaagggttctcgaaccttttggcctggttgaagagggtgctaagacggcccctaccggaaagcggatagacgaccactttccaaaaagaaagaaggtccggaccgaagaggactccaagccttccacctcgtcagacgccgaagctggacccagcggatcccagcagctgcaaatcccagcccaaccagcctcaagtttgggagctgatacaatgtctgcgggaggtggcggcccattgggcgacaataaccaaggtgccgatggagtgggcaatgcctcgggagattggcattgcgattccacgtggatgggggacagagtcgtcaccaagtccacccgaacctgggtgctgcccagctacaacaaccaccagtaccgagagatcaaaagcggctccgtcgacggaagcaacgccaacgcctactttggatacagcaccccctgggggtactttgactttaaccgcttccacagccactggagcccccgagactggcaaagactcatcaacaactactggggcttcagaccccggtccctcagagtcaaaatcttcaacattcaagtcaaagaggtcacggtgcaggactccaccaccaccatcgccaacaacctcacctccaccgtccaagtgtttacggacgacgactaccagctgccctacgtcgtcggcaacgggaccgagggatgcctgccggccttccctccgcaggtctttacgctgccgcagtacggttacgcgacgctgaaccgcgacaacacagaaaatcccaccgagaggagcagcttcttctgcctagagtactttcccagcaagatgctgagaacgggcaacaactttgagtttacctacaactttgaggaggtgcccttccactccagcttcgctcccagtcagaacctcttcaagctggccaacccgctggtggaccagtacttgtaccgcttcgtgagcacaaataacactggcggagtccagttcaacaagaacctggccgggagatacgccaacacctacaaaaactggttcccggggcccatgggccgaacccagggctggaacctgggctccggggtcaaccgcgccagtgtcagcgccttcgccacgaccaataggatggagctcgagggcgcgagttaccaggtgcccccgcagccgaacggcatgaccaacaacctccagggcagcaacacctatgccctggagaacactatgatcttcaacagccagccggcgaacccgggcaccaccgccacgtacctcgagggcaacatgctcatcaccagcgagagcgagacgcagccggtgaaccgcgtggcgtacaacgtcggcgggcagatggccaccaacaaccagagctccaccactgcccccgcgaccggcacgtacaacctccaggaaatcgtgcccggcagcgtgtggatggagagggacgtgtacctccaaggacccatctgggccaagatcccagagacgggggcgcactttcacccctctccggccatgggcggattcggactcaaacacccaccgcccatgatgctcatcaagaacacgcctgtgcccggaaatatcaccagcttctcggacgtgcccgtcagcagcttcatcacccagtacagcaccgggcaggtcaccgtggagatggagtgggagctcaagaaggaaaactccgagaggtggaacccagagatccagtacacaaacaactacaacgacccccagtttgtggactttgccccggacagcaccggggaatacagaaccaccagacctattggaacccgataccttacccgacccctttaa

SEQ ID NO: 3181 - DNA, 2175 bp, Artificial Sequence
  Synthetic polynucleotide
atgtcttttgttgatcaccctccagattggttggaagaagttggtgaaggtcttcgcgagtttttgggccttgaagcgggcccaccgaaaccaaaacccaatcagcagcatcaagatcaagcccgtggtcttgtgctgcctggttataactatctcggacccggaaacggtctcgatcgaggagagcctgtcaacagggcagacgaggtcgcgcgagagcacgacatctcgtacagcgagcagcttgaggcgggagacaacccctacctcaagtacaaccacgcggacgccgagtttcaggagaagctcgccgacgacacatccttcgggggaaacctcggaaaggcagtctttcaggccaagaaaagggttctcgaaccttttggcctggttgaagagggtgctaagacggcccctaccggaaagcggatagacgaccactttccaaaaagaaagaaggcccggaccgaagaggactccaagccttccacctcgtcagacgccgaagctggacccagcggatcccagcagctgcaaatcccagcccaaccagcctcaagtttgggagctgatacaatgtctgcgggaggtggcggcccattgggcgacaataaccaaggtgccgatggagtgggcaatgcctcgggagattggcattgcgattccacgtggatgggggacagagtcgtcaccaagtccacccgaacctgggtgctgcccagctacaacaaccaccagtaccgagagatcaaaagcggctccgtcgacggaagcaacgccaacgcctactttggatacagcaccccctgggggtactttgactttaaccgcttccacagccactggagcccccgagactggcaaagactcatcaacaactactggggcttcagaccccggtccctcagagtcaaaatcttcaacattcaagtcaaagaggtcacggtgcaggactccaccaccaccatcgccaacaacctcacctccaccgtccaagtgtttacggacgacgactaccagctgccctacgtcgtcggcaacgggaccgagggatgcctgccggccttccctccgcaggtctttacgctgccgcagtacggttacgcgacgctgaaccgcgacaacacagaaaatcccaccgagaggagcagcttcttctgcctagagtactttcccagcaagatgctgagaacgggcaacaactttgagtttacctacaactttgaggaggtgcccttccactccagcttcgctcccagtcagaacctcttcaagctggccaacccgctggtggaccagtacttgtaccgcttcgtgagcacaaataacactggcggagtccagttcaacaagaacctggccgggagatacgccaacacctacaaaaactggttcccggggcccatgggccgaacccagggctggaacctgggctccggggtcaaccgcgccagtgtcagcgccttcgccacgaccaataggatggagctcgagggcgcgagttaccaggtgcccccgcagccgaacggcatgaccaacaacctccagggcagcaacacctatgccctggagaacactatgatcttcaacagccagccggcgaacccgggcaccaccgccacgtacctcgagggcaacatgctcatcaccagcgagagcgagacgcagccggtgaaccgcgtggcgtacaacgtcggcgggcagatggccaccaacaaccagagctccaccactgcccccgcgaccggcacgtacaacctccaggaaatcgtgcccggcagcgtgtggatggagagggacgtgtacctccaaggacccatctgggccaagatcccagagacgggggcgcactttcacccctctccggccatgggcggattcggactcaaacacccaccgcccatgatgctcatcaagaacacgcctgtgcccggaaatatcaccagcttctcggacgtgcccgtcagcagcttcatcacccagtacagcaccgggcaggtcaccgtggagatggagtgggagctcaagaaggaaaactccaagaggtggaacccagagatccagtacacaaacaactacaacgacccccagtttgtggactttgccccggacagcaccggggaatacagaaccgccagacctatcggaacccgataccttacccgacccctttaa

SEQ ID NO: 3182 - DNA, 2175 bp, Artificial Sequence
  Synthetic polynucleotide
atgtcttttgttgatcaccctccagattggttggaagaagttggtgaaggtcttcgcgagtttttgggccctgaagcgggcccaccgaaaccaaaacccaatcagcagcatcaagatcaagcccgtggtcttgtgctgcctggttataactatctcggacccggaaacggtctcgatcgaggagagcctgtcaacagggcagacgaggtcgcgcgagagcacgacatctcgtacaacgagcagcttgaggcgggagacaacccctacctcaagtacaaccacgcggacgccgagtttcaggagaagctcgccgacgacacatccttcgggggaaacctcggaaaggcagtctttcaggccaagaaaagggttctcgaaccttttggcctggttgaagagggtgctaagacggcccctaccggaaagcggatagacgaccactttccaaaaagaaagaaggcccggaccgaagaggactccaagccttccacctcgtcagacgccgaagctggacccagcggatcccagcagctgcaaatcccagcccaaccagcctcaagtttgggagctgatacaatgtctgcgggaggtggcggcccattgggcgacaataaccaaggtgccgatggagtgggcaatgcctcgggagattggcattgcgattccacgtggatgggggacagagtcgtcaccaagtccacccgaacctgggtgctgcccagctacaacaaccaccagtaccgagagatcaaaagcggctccgtcgacggaagcaacgccaacgcctactttggatacagcaccccctgggggtactttgactttaaccgcttccacagccactggagcccccgagactggcaaagactcatcaacaactactggggcttcagaccccggtccctcagagtcaaaatcttcaacattcaagtcaaagaggtcacggtgcaggactccaccaccaccatcgccaacaacctcacctccaccgtccaagtgtttacggacgacgactaccagctgccctacgtcgtcggcaacgggaccgagggatgcctgccggccttccctccgcaggtctttacgctgccgcagtacggttacgcgacgctgaaccgcgacaacacagaaaatcccaccgagaggagcagcttcttctgcctagagtactttcccagcaagatgctgagaacgggcaacaactttgagtttacctacaactttgaggaggtgcccttccactccagcttcgctcccagtcagaacctcttcaagctggccaacccgctggtggaccagtacttgtaccgcttcgtgagcacaaataacactggcggagtccagttcaacaagaacctggccgggagatacgccaacacctacaaaaactggttcccggggcccatgggccgaacccagggctggaacctgggctccggggtcaaccgcgccagtgtcagcgccttcgccacgaccaataggatggagctcgagggcgcgagttaccaggtgcccccgcagccgaacggcatgaccaacaacctccagggcagcaacacctatgccctggagaacactatgatcttcaacagccagccggcgaacccgggcaccaccgccacgtacctcgagggcaacatgctcatcaccagcgagagcgagacgcagccggtgaaccgcgtggcgtacaacgtcggcgggcagatgaccaccaacaaccagagctccaccactgcccccgcgaccggcacgtacaacctccaggaaatcgtgcccggcagcgtgtggatggagagggacgtgtacccccaaggacccatctgggccaagatcccagagacgggggcgcactttcacccctctccggccatgggcggattcggactcaaacacccaccgcccatgatgctcatcaagaacacgcctgtgcccggaaatatcaccagcttctcggacgtgcccgtcagcagcttcatcacccagtacagcaccgggcaggtcaccgtggagatggagtgggagctcaagaaggaaaactccaagaggtggaacccagagatccagtacacaaacaactacaacgacccccagtttgtggactttgccccggacagcaccggggaatacaggaccaccagacctatcggaacccgataccttacccgacccctttaa

SEQ ID NO: 3183 - DNA, 2175 bp, Artificial Sequence
  Synthetic polynucleotide
atgtcttttgttgatcaccctccagattggttggaagaagttggtgaaggtcttcgcgagtttttgggccttgaagcgggcccaccgaaaccaaaacccaatcagcagcatcaagatcaagcccgtggtcttgtgctgcctggttataactatctcggacccggaaacggtctcgatcgaggagagcctgtcaacagggcagacgaggtcgcgcgagagcacgacatctcgtacaacgagcagcttgaggcgggagacaacccctacctcaagtacaaccacgcggacgccgagtttcaggagaagctcgccgacgacacatccttcgggggaaacctcggaaaggcagtctttcaggccaagaaaagggttctcgaaccttttggcctggttgaagagggtgctaagacggcccctaccggaaagcggatagacgaccactttccaaaaagaaagaaggcccggaccgaagaggactccaagccttccacctcgtcagacgccgaagctggacccagcggatcccagcagctgcaaatcccagcccaaccagcctcaagtttgggagctgatacaatgtctgcgggaggtggcggcccattgggcgacaataaccaaggtgccgatggagtgggcaatgcctcgggagattggcattgcgattccacgtggatgggggacagagtcgtcaccaagtccacccgaacctgggtgctgcccagctacaacaaccaccagtaccgagagatcaaaagcggctccgtcgacggaagcaacgccaacgcctactttggatacagcaccccctgggggtactttgactttaaccgcttccacagccactggagcccccgagactggcaaagactcatcaacaactactggggcttcagaccccggtccctcagagtcaaaatcttcaacattcaagtcaaagaggtcacggtgcaggactccaccaccaccatcgccaacaacctcacctccaccgtccaagtgtttacggacgacgactaccagctgccctacgtcgtcggcaacgggaccgagggatgcctgccggccttccctccgcaggtctttacgctgccgcagtacggttacgcgacgctgaaccgcgacaacacagaaaatcccaccgagaggagcagcttcctctgcctagagtactttcccagcaagatgctgagaacgggcaacaactttgagtttacctacaactttgaggaggtgcccttccactccagcttcgctcccagtcagaacctcttcaagctggccaacccgctggtggaccagtacttgtaccgcttcgtgagcacaaataacactggcggagtccagttcaacaagaacctggccgggagatacgccaacacctacaaaaactggttcccggggcccatgggccgaacccagggctggaacctgggctccggggtcaaccgcgccagtgtcagcgccttcgccacgaccaataggatggagctcgagggcgcgagttaccaggtgcccccgcagccgaacggcatgaccaacaacctccagggcagcaacacctatgccctggagaacactatgatcttcaacagccagccggcgaacccgggcaccaccgccacgtacctcgagggcaacatgctcatcaccagcgagagcgagacgcagccggtgaaccgcgtggcgtacaacgtcggcgggcagatggccaccaacaaccagagctccaccactgcccccgcgaccggcacgtacaacctccaggaaatcgtgcccggcagcgtgtggatgaagagggacgtgtacctccaaggacccatctgggccaagatcccagagacgggggcgcactttcacccctctccggccatgggcggattcggactcaaacacccaccgcccatgatgctcatcaagaacacgcctgtgcccggaaatatcaccagcttctcggacgtgcccgtcagcagcttcatcacccagtacagcaccgggcaggtcaccgtggagatggagtgggagctcaagaaggaaaactccaagaggtggaacccagagatccagtacacaaacaactacaacgacccccagtttgtggactttgccccggacagcaccggggaatacagaaccaccagacctatcggaacccgataccttacccgacccctttaa

SEQ ID NO: 3184 - DNA, 2175 bp, Artificial Sequence
  Synthetic polynucleotide
atgtcttttgttgatcaccctccagattggttggaagaagttggtgaaggtcttcgcgagtttttgggccttgaggcgggcccaccgaaaccaaaacccaatcagcagcatcaagatcaagcccgtggtcttgtgctgcctggttataactatctcggacccggaaacggtctcgatcgaggagagcctgtcaacagggcagacgaggtcgcgcgagagcacgacatctcgtacaacgagcagcttgaggcgggagacaacccctacctcaagtacaaccacgcggacgccgagtttcaggagaagctcgccgacgacacatccttcgggggaaacctcggaaaggcagtctttcaggccaagaaaagggttctcgaaccttttggcctggttgaagagggtgctaagacggcccctaccggaaagcggatagacgaccactttccaaaaagaaagaaggcccggaccgaagaggactccaagccttccaccccgtcagacgccgaagctggacccagcggatcccagcagctgcaaatcccagcccaaccagcctcaagtttgggagctgatacaatgtctgcgggaggtggcggcccattgggcgacaataaccaaggtgccgatggagtgggcaatgcctcgggagattggcattgcgattccacgtggatgggggacagagtcgtcaccaagtccacccgaacctgggtgctgcccagctacaacaaccaccagtaccgagagatcaaaagcggctccgtcgacggaagcaacgccaacgcctactttggatacagcaccccctgggggtactttgactttaaccgcttccacagccactggagcccccgagactggcaaagactcatcaacaactactggggcttcagaccccggtccctcagagtcaaaatcttcaacattcaagtcaaagaggtcacggtgcaggactccaccaccaccatcgccaacaacctcacctccaccgtccaagtgtttacggacgacgactaccagctgccctacgtcgtcggcaacgggaccgagggatgcctgccggccttccctccgcaggtctttacgctgccgcagtacggttacgcgacgctgaaccgcgacaacacagaaaatcccaccgagaggagcagcttcttctgcctagagtactttcccagcaagatgctgagaacgggcaacaactttgagtttacctacaactttgaggaggtgcccttccactccagcttcgctcccagtcagaacctcttcaagctggccaacccgctggtggaccagtacttgtaccgcttcgtgagcacaaataacactggcggagtccagttcaacaagaacctggccgggagatacgccaacacctacaaaaactggttcccggggcccatgggccgaacccagggctggaacctgggctccggggtcaaccgcgccagtgtcagcgccttcgccacgaccaataggatggagctcgagggcgcgagttaccaggtgcccccgcagccgaacggcatgaccaacaacctccagggcagcaacacctatgccctggagaacactatgatcttcaacagccagccggcgaacccgggcaccaccgccacgtacctcgagggcaacatgctcatcaccagcgagagcgagacgcagccggtgaaccgcgtggcgtacaacgtcggcgggcagatggccaccaacaaccagagctccaccactgcccccgcgaccggcacgtacaacctccaggaaatcgtgcccggcagcgtgtggatggagagggacgtgtacctccaaggacccatctgggccaagatcccagagacgggggcgcactttcacccctctccggccatgggcggattcggactcaaacacccaccgcccatgatgctcatcaagaacacgcctgtgcccggaaatatcaccagcttctcggacgtgcccgtcagcagcttcatcacccagtacagcaccgggcaggtcaccgtggagatggagtgggagctcaagaaggaaaactccaagaggtggaacccagagatccagtacacaaacaactacaacgacccccagtttgtggactttgccccggacagcaccggggaatacagaaccaccagacctatcggaacccgataccttacccgacccctttaa

SEQ ID NO: 3185 - DNA, 2175 bp, Artificial Sequence
  Synthetic polynucleotide
atgtcttttgttgatcaccctccagattggttggaagaagttggtgaaggtcttcgcgagtttttgggccttgaagcgggcccaccgaaaccaaaacccaatcagcagcatcaagatcaagcccgtggtcttgtgctgcctggttataactatctcggacccggaaacggtctcgatcgaggagagcctgtcaacagggcagacgaggtcgcgcgagagcacgacatctcgtacaacgagcagcttgaggcgggagacaacccctacctcaagtacaaccacgcggacgccgagtttcaggagaagctcgccgacgacacatccttcgggggaaacctcggaaaggcagtctttcaggccaagaaaagggttctcgaaccttttggcctggttgaagagggtgctaagacggcccctaccggaaagcggatagacgaccactttccaaaaagaaagaaggcccggaccgaagaggactccaagccttccacctcgtcagacgccgaagctggacccagcggatcccagcagctgcaaatcccagcccaaccagcctcaagtttgggagctgatacaatgtctgcgggaggtggcggcccattgggcgacaataaccaaggtgccgatggagtgggcaatgcctcgggagattggcattgcgattccacgtggatgggggacagagtcgtcaccaagtccacccgaacctgggtgctgcccagctacaacaaccaccagtaccgagagatcaaaagcggctccgtcgacggaagcaacgccaacgcctactttggatacagcaccccctgggggtactttgactttaaccgcttccacagccactggagcccccgagactggcaaagactcatcaacaactactggggcttcagaccccggtccctcagagtcaaaatcttcaacattcaagtcaaagaggtcacggtgcaggactccaccaccaccatcgccaacaacctcacctccaccgtccaagtgtttacggacgacgactaccagctgccctacgtcgtcggcaacgggaccgagggatgcctgccggccttccctccgcaggtctttacgctgccgcagtacggttacgcgacgctgaaccgcgacaacacagaaaatcccaccgagaggagcagcttcttctgcctagagtactttcccagcaagatgctgagaacgggcaacaactttgagtttacctacaactttgaggaggtgcccttccactccagcttcgctcccagtcagaacctcttcaagctggccaacccgctggtggaccagtacttgtaccgcttcgtgagcacaaataacactggcggagtccagttcaacaagaacctggccgggagatacgccaacacccacaaaaactggttcccggggcccatgggccgaacccagggctggaacctgggctccggggtcaaccgcgccagtgtcagcgccttcgccacgaccaataggatggagctcgagggcgcgagttaccaggtgcccccgcagtcgaacggcatgaccaacaacctccggggcagcaacacctatgccctggagaacactatgatcttcaacagccagccggcgaacccgggcaccaccgccacgtacctcgagggcaacatgctcatcaccagcgagagcgagacgcagccggtgaaccgcgtggcgtacaacgtcggcgggcagatggccaccaacaaccagagctccaccactgcccccgcgaccggcacgtacaacctccaggaaatcgtgcccggcagcgtgtggatggagagggacgtgtacctccaaggacccatctgggccaagatcccagagacgggggcgcactttcacccctctccggccatgggcggattcggactcaaacacccaccgcccatgatgctcatcaagaacacgcctgtgcccggaaatatcaccagcttctcggacgtgcccgtcagcagcttcatcacccagtacagcaccgggcaggtcaccgtggagatggagtgggagctcaagaaggaaaactccaagaggtggaacccagagatccagtacacaaacaactacaacgacccccagtttgtggactttgccccggacagcaccggggaatacagaaccaccagacctatcggaacccgataccttacccgacccctttaa

SEQ ID NO: 3186 - DNA, 2175 bp, Artificial Sequence
  Synthetic polynucleotide
atgtcttttgttgatcaccctccagattggttggaagaagttggtgaaggtcttcgcgagtttttgggccttgaagcgggcccaccgaaaccaaaacccaatcagcagcatcaagatcaagcccgtggtcttgtgctgcctggttataactatctcggacccggaaacggtctcgatcgaggagagcctgtcaacagggcagacgaggtcgcgcgagagcacgacatctcgtacaacgagcagcttgaggcgggagacaacccctacctcaagtacaaccacgcggacgccgagtttcaggagaagctcgccgacgacacatccttcgggggaaacctcggaaaggcagtctttcaggccaagaaaagggttctcgaaccttttggcctggttgaagagggtgctaagacggcccctaccggaaagcggatagacgaccactttccaaaaagaaagaaggcccggaccgaagaggactccaagccttccacctcgtcagacgccgaagctggacccagcggatcccagcagctgcaaatcccagcccaaccagcctcaagtttgggagctgatacaatgtctgcgggaggtggcggcccattgggcgacaataaccaaggtgccgatggagtgggcaatgcctcgggagattggcattgcgattccacgtggatgggggacagagtcgtcaccaagtccacccgaacctgggtgctgcccagctacaacaaccaccagtaccgagagatcaaaagcggctccgtcgacggaagcaacgccaacgcctactttggatacagcaccccctgggggtactttgactttaaccgcttccacagccactggagcccccgagactggcaaagactcatcaacaactactggggcttcagaccccggtccctcagagtcaaaatcttcaacattcaagtcaaagaggtcacggtgcaggactccaccaccaccatcgccaacaacctcacctccaccgtccaagtgtttacggacgacgactaccagctgccctacgtcgtcggcaacgggaccgagggatgcctgccggccttccctccgcaggtctttacgctgccgcagtacggttacgcgacgctgaaccgcgacaacacagaaaatcccaccgagaggagcagcttcttctgcctagagtactttcccagcaagatgctgagaacgggcaacaactttgagtttacctacaactttgaggaggtgcccttccactccagcttcgctcccagtcagaacctcttcaagctggccaacccgctggtggaccagtacttgtaccgcttcgtgagcacaaataacactggcggagtccagttcaacaagaacctggccgggagatacgccaacacctacaaaaactggttcccggggcccatgggccgaacccagggctggaacctgggctccggggtcaaccgcgccagtgtcagcgccttcgccacgaccaataggatggagctcgagggcgcgagttaccaggtgcccccgcagccgaacggcatgaccaacaacctccagggcagcaacacctatgccctggagaacactatgatcttcaacagccagccggcgaacccgggcaccaccgccacgtacctcgagggcaacatgctcatcaccagcgagagcgagacgcagccggtgaaccgcgtggcgtacagcgtcggcgggcagatggccaccaacaaccagagctccaccactgcccccacgaccggcacgtacaacctccaggaaatcgtgcccggcagcgtgtggatggagagggacgtgtacctccaaggacccatctgggccaagatcccagagacgggggcgcactttcacccctctccggccatgggcggattcagactcaaacacccaccgcccatgatgctcatcaagaacacgcctgtgcccggaaatatcaccagcttctcggacgtgcccgtcagcagcttcatcacccagtacagcaccgggcaggtcaccgtggagatggagtgggagctcaagaaggaaaactccaagaggtggaacccagagatccagtacacaaacaactacaacgacccccagtttgtggactttgccccggacagcaccggggaatacagaaccaccagacctatcggaacccgataccttacccgacccctttaa

SEQ ID NO: 3187 - DNA, 2175 bp, Artificial Sequence
  Synthetic polynucleotide
atgtcttttgttgatcaccctccagattggttggaagaagttggtgaaggtcttcgcgagtttttgggccttgaagcgggcccaccgaaaccaaaacccaatcagcagcatcaagatcaagcccgtggtcttgtgctgcctggttataactatctcggacccggaaacggtctcgatcgaggagagcctgtcaacagggcagacgaggtcgcgcgagagcacgacatctcgtacaacgagcagcttgaggcgggagacaacccctacctcaagtacaaccacgcggacgccgagtttcaggagaagctcgccgacgacacatccttcgggggaaacctcggaaaggcagtctttcaggccaagaaaagggttctcgaaccttttggcctggttgaagagggtgctaagacggcccctaccggaaagcggatagacgaccactttccaaaaagaaagaaggcccggaccgaagaggactccaagccttccacctcgtcagacgccgaagctggacccagcggatcccagcagctgcaaatcccagcccaaccagcctcaagtttgggagctgatacaatgtctgcgggaggtggcggcccattgggcgacaataaccaaggtgccgatggagtgggcaatgcctcgggagattggcattgcgattccacgtggatgggggacagagtcgtcaccaagtccacccgaacctgggtgctgcccagctacaacaaccaccagtaccgagagatcaaaagcggctccgtcgacggaagcaacgccaacgcctactttggatacagcaccccctgggggtactttgactttaaccgcttccacagccactggagcccccgagactggcaaagactcatcaacaactactggggcttcagaccccggtccctcagagtcaaaatcttcaacattcaagtcaaagaggtcacggtgcaggactccaccaccaccatcgccaacaacctcacctccaccgtccaagtgtttacggacgacgactaccagctgccctacgtcgtcggcaacgggaccgagggatgcctgccggccttccctccgcaggtctttacgctgccgcagtacggttacgcgacgctgaaccgcgacaacacagaaaatcccaccgagaggagcagcttcttctgcctagagtactttcccagcaagatgctgagaacgggcaacaactttgagtttacctacaactttgaggaggtgcccttccactccagcttcgctcccagtcagaacctcttcaagctggccaacccgctggtggaccagtacttgtaccgcttcgtgagcacaaataacactggcggagtccagttcaacaagaacctggccgggagatacgccaacacctacaaaaactggttcccggggcccatgggccgaacccagggctggaacctgggctccggggtcaaccgcgccagtgtcagcgccttcgccgcgaccaataggatggagctcgagggcgcgagttaccaggtgcccccgcagccgaacggcatgaccaacaacctccagggcagcaacacctatgccctggagaacactatgatcttcaacagccagccggcgaacccgggcaccaccgccacgtacctcgagggcaacatgctcatcaccagcgagagcgagacgcagccggtgaaccgcgtggcgtacaacgtcggcgggcagatggccaccaacaaccagagctccaccactgcccccgcgaccggcacgtacaacctccaggaaatcgtgcccggcggcgtgtggatggagagggacgtgtacctccaaggacccatctgggccaagatcccagagacgggggcgcactttcacccctctccggccatgggcggattcggactcaaacacccaccgcccatgatgctcatcaagaacacgcctgtgcccggaaataccaccagcttctcggacgtgcccgtcagcagcttcatcacccagtacagcaccgggcaggtcaccgtggagatggagtgggagctcaagaaggaaaactccaagaggtggaacccagagatccagtacacaaacaactacaacgacccccagtttgtggactttgccccggacagcaccggggaatacagaaccaccagacctatcggaacccgataccttacccgacccctttaa

SEQ ID NO: 3188 - DNA, 2175 bp, Artificial Sequence
  Synthetic polynucleotide
atgtcttttgttgatcaccctccagattggttggaagaagttggtgaaggtcttcgcgagtttttgggccttgaagcgggcccaccgaaaccaaaacccaatcagcagcatcaagatcaagcccgtggtcttgtgctgcctggttataactatctcggacccggaaacggtctcgatcgaggagagcctgtcaacagggcagacgaggtcgcgcgagagcacgacatctcgtacaacgagcagcttgaggcgggagacaacccctacctcaagtacaaccacgcggacgccgagtttcaggagaagctcgccgacgacacatccttcgggggaaacctcggaaaggtagtctttcaggccaagaaaagggttctcgaaccttttggcctggttgaagagggtgctaagacggcccctaccggaaagcggatagacgaccactttccaaaaagaaagaaggcccggaccgaagaggactccaagccttccacctcgtcagacgccgaagctggacccagcggatcccagcagctgcaaatcccagcccaaccagcctcaagtttgggagctgatacaatgtctgcgggaggtggcggcccattgggcggcaataaccaaggtgccgatggagtgggcaatgcctcgggagattggcattgcgattccacgtggatgggggacagagtcgtcaccaagtccacccgaacctgggtgctgcccagctacaacaaccaccagtaccgagagatcaaaagcggctccgtcgacggaagcaacgccaacgcctactttggatacagcaccccctgggggtactttgactttaaccgcttccacagccactggggcccccgagactggcaaagactcatcaacaactactggggcttcagaccccggtccctcagagtcaaaatcttcaacattcaagtcaaagaggtcacggtgcaggactccaccaccaccatcgccaacaacctcacctccaccgtccaagtgtttacggacgacgactaccagctgccctacgtcgtcggcaacgggaccgagggatgcctgccggccttccctccgcaggtctttacgctgccgcagtacggttacgcgacgctgaaccgcgacaacacagaaaatcccaccgagaggagcagcttcttctgcctagagtactttcccagcaagatgctgagaacgggcaacaactttgagtttacctacaactttgaggaggtgcccttccactccagcttcgctcccagtcagaacctcttcaagctggccaacccgctggtggaccagtacttgtaccgcttcgtgagcacaaataacactggcggagtccagttcaacaagaacctggccgggagatacgccaacacctacaaaaactggttcccggggcccatgggccgaacccagggctggaacctgggctccggggtcaaccgcgccagtgtcagcgccctcgccacgaccaataggatggagctcgagggcgcgagttaccaggtgcccccgcagccgaacggcatgaccaacaacctccagggcagcaacacctatgccctggagaacactatgatcttcaacagccagccggcgaacccgggcaccaccgccacgtacctcgagggcaacatgctcatcaccagcgagagcgagacgcagccggtgaaccgcgtggcgtacaacgtcggcgggcagatggccaccaacaaccagagctccaccactgcccccgcgaccggcacgtacaacctccaggaaatcgtgcccggcagcgtgtggatggagagggacgtgtacctccaaggacccatctgggccaagatcccagagacgggggcgcactttcacccctctccggccatgggcggattcggactcaaacacccaccgcccatgatgctcatcaagaacacgcctgtgcccggaaatatcaccagcttctcggacgtgcccgtcagcagcttcatcacccagtacagcaccgggcaggtcaccgtggagatggagtgggagctcaagaaggaaaactccaagaggtggaacccagagatccagtacacaaacaactacaacgacccccagtttgtggactttgccccggacagcaccggggaatacagaaccaccagacctatcggaacccgataccttacccgacccctttaa

SEQ ID NO: 3189 - DNA, 2175 bp, Artificial Sequence
  Synthetic polynucleotide
atgtcttttgttgatcaccctccagattggttggaagaagttggtgaaggtcttcgcgagtttttgggccttgaagcgggcccaccgaaaccaaaacccaatcagcagcatcaagatcaagcccgtggtcttgtgctgcctggttataactatctcggacccggaaacggtctcgatcgaggagagcctgtcaacagggcagacgaggtcgcgcgagagcacgacatctcgtacaacgagcagcttgaggcgggagacaacccctacctcaagtacaaccacgcggacgccgagtttcaggagaagctcgccgacgacacatccttcgggggaaacctcggaaaggcagtctttcaggccaagaaaagggttctcgaaccttttggcctggttgaagagggtgctaagacggcccctaccggaaagcggatagacgaccactttccaaaaagaaagaaggcccggaccgaagaggactccaagccttccacctcgtcagacgccgaagctggacccagcggatcccagcagctgcaaatcccagcccaaccagcctcaagtttgggagctgatacaatgtctgcgggaggtggcggcccattgggcgacaataaccaaggtgccgatggagtgggcaatgcctcgggagattggcattgcgattccacgtggatgggggacagagtcgtcaccaagtccacccgaacctgggtgctgcccagctacaacaaccaccagtaccgagagatcaaaagcggctccgtcgacggaagcaacgccaacgcctactttggatacagcaccccctgggggtactttgactttaaccgcttccacagccactggagcccccgagactggcaaagactcatcaacaactactggggcttcagaccccggtccctcagagtcaaaatcttcaacattcaagtcaaagaggtcacggtgcaggactccaccaccaccatcgccaacaacctcacctccaccgtccaagtgtttacggacgacgactaccagctgccctacgtcgtcggcaacgggaccgagggatgcctgccggccttccctccgcaggtctttacgctgccgcagtacggttacgcgacgctgaaccgcgacaacacagaaaatcccaccgagaggagcagcttcttctgcctagagtactttcccagcaagatgctgagaacgggcaacaactttgagtttacctacaactttgaggaggtgcccttccactccagcttcgctcccagtcagaacctcttcaagctggccaacccgctggtggaccagtacttgtaccgcttcgtgagcacaaataacactggcggagtccagttcaacaagaacctggccgggagatacgccaacacctacaaaaactggttcccggggcccatgggccgaacccagggctggaacctgggctccggggtcaaccgcgccagtgtcagcgccttcgccacgaccaataggatggagctcgagggcgcgagttaccaggtgcccccgcagccgaacggcatgaccaacaacctccagggcagcaacacctatgccctggagaacactatgatcttcaacagccagccggcgaacccgggcaccaccgccacgtacctcgagggcaacatgctcatcaccagcgagagcgagacgcagccggtgaaccgcgtggcgtacaacgtcggcgggcagatggccaccaacaaccagagctccaccactgcccccgcgaccggcacgtacaacctccaggaaatcgtgcccggcagcgtgtggatggagagggacgtgtacctccaaggacccatctgagccaagatcccagagacgggggcgcactttcacccctctccggccatgggcggattcggactcaaacacccaccgcccatgatgctcatcaagaacacgcctgtgcccggaaatatcaccagcttctcggacgtgcccgtcagcagcttcatcacccagtacagcaccgggcaggtcaccgtggagatggagtgggagctcaagaaggaaaactccaagaggtggaacccagagatccagtacacaaacaactacaacgacccccagtttgtggactttgccccggacagcaccggggaatgcagaaccaccagacctatcggaacccgataccttacccgacccctttaa

SEQ ID NO: 3190 - DNA, 2175 bp, Artificial Sequence
  Synthetic polynucleotide
atgtcttttgttgatcaccctccagattggttggaagaagttggtgaaggtcttcgcgagtttttgggccttgaagcgggcccaccgaaaccaaaacccaatcagcagcatcaagatcaagcccgtggtcttgtgctgcctggttataactatctcggacccggaaacggtctcgatcgaggagagcctgtcaacagggcagacgaggtcgcgcgagagcacgacatctcgtacaacgagcagcttgaggcgggagacaacccctacctcaagtacaaccacgcggacgccgagtttcaggagaagctcgccgacgacacatccttcgggggaaacctcggaaaggcagtctttcaggccaagaaaagggttctcgaaccttttggcctggttgaagagggtgctaagacggcccctaccggaaagcggatagacgaccactttccaaaaagaaagaaggcccggaccgaagaggactccaagccttccacctcgtcagacgccgaagctggacccagcggatcccagcagctgcaaatcccagcccaaccagcctcaagtttgggagctgatacaatgtctgcgggaggtggcggcccattgggcgacaataaccaaggtgccgatggagtgggcaatgcctcgggagattggcattgcgattccacgtggatgggggacagagtcgtcaccaagtccacccgaacctgggtgctgcccagctacaacaaccaccagtaccgagagatcaaaagcggctccgtcgacggaagcaacgccaacgcctactttggatacagcaccccctgggggtactttgactttaaccgcttccacagccactggagcccccgagactggcaaagactcatcaacaactactggggcttcagaccccggtccctcagagtcaaaatcctcaacattcaagtcaaagaggtcacggtgcaggactccaccaccaccatcgccaacaacctcacctccaccgtccaagtgtttacggacgacgactaccagctgccctacgtcgtcggcaacgggaccgagggatgcctgccggccttccctccgcaggtctttacgctgccgcagtacggttacgcgacgctgaaccgcgacaacacagaaaatcccaccgagaggagcagcttcttctgcctagagtactttcccagcaagatgctgagaacgggcaacaactttgagtttacctacaactttgaggaggtgcccttccactccagcttcgctcccagtcagaacctcttcaagctggccaacccgctggtgggccagtacttgtaccgcttcgtgagcacaaataacactggcggagtccagttcaacgagaacctggccgggagatacgccaacacctacaaaaactggttcccggggcccatgggccgaacccagggctggaacctgggctccggggtcaaccgcgccagtgtcagcgccttcgccacgaccaataggatggagctcgagggcgcgagttaccaggtgcccccgcagccgaacggcatgaccaacaacctccagggcagcaacacctatgccctggagaacactatgatcttcaacagccagccggcgaacccgggcaccaccgccacgtacctcgagggcaacatgctcatcaccagcgagagcgagacgcagccggtgaaccgcgtggcgtacaacgtcggcgggcagatggccaccaacaaccagagctccaccactgcccccgcgaccggcacgtacaacctccaggaaatcgtgcccggcagcgtgtggatggagagggacgtgtacctccaaggacccatctgggccaagatcccagagacgggggcgcactttcacccctctccggccatgggcggattcggactcaaacacccaccgcccatgatgctcatcaagaacacgcctgtgcccggaaatatcaccagcttctcggacgtgcccgtcagcagcttcatcacccagtacagcaccgggcaggccaccgtggagatggagtgggagctcaagaaggaaaactccaagaggtggaacccagagatccagtacacaaacaactacaacgacccccagtttgtggactttgccccggacagcaccggggaatacagaaccaccagacctatcggaacccgataccttacccgacccctttaa

SEQ ID NO: 3191 - DNA, 2175 bp, Artificial Sequence
  Synthetic polynucleotide
atgtcttttgttgatcaccctccagattggttggaagaagttggtgaaggtcttcgcgagtttttgggccttgaagcgggcccaccgaaaccaaaacccaatcagcagcatcaagatcaagcccgtggtcttgtgctgcctggttataactatctcggacccggaaacggcctcgatcgaggagagcctgtcaacagggcagacgaggtcgcgcgagagcacgacatctcgtacaacgagcagcttgaggcgggagacaacccctacctcaagtacaaccacgcggacgccgagtttcaggagaagctcgccgacgacacatccttcgggggaaacctcggaaaggcagtctttcaggccaagaaaagggttctcgaaccttttggcctggttgaagagggtgctaagacggcccctaccggaaagcggatagacgaccactttccaaaaagaaagaaggcccggaccgaagaggactccaagccttccacctcgtcagacgccgaagctggacccagcggatcccagcagctgcaaatcccagcccaaccagcctcaagtttgggagctgatacaatgtctgcgggaggtggcggcccattgggcgacaataaccaaggtgccgatggagtgggcaatgcctcgggagattggcattgcgattccacgtggatgggggacagagtcgtcaccaagtccacccgaacctgggtgctgcccagctacaacaaccaccagtaccgagagatcaaaagcggctccgtcgacggaagcaacgccaacgcctactttggatacagcaccccctgggggtactttgactttaaccgcttccacagccactggagcccccgagactggcaaagactcatcaacaactactggggcttcagaccccggtccctcagagtcaaaatcttcaacattcaagtcaaagaggtcacggtgcaggactccaccaccatcatcgccaacaacctcacctccaccgtccaagtgtttacggacgacgactaccagctgccctacgtcgtcggcaacgggaccgagggatgcctgccggccttccctccgcaggtctttacgctgccgcagtacggttacgcgacgctgaaccgcgacaacacagaaaatcccaccgagaggagcagcttcttctgcctagagtactttcccagcaagatgctgagaacgggcaacaactttgagtttacctacaactttgaggaggtgcccttccactccagcttcgcccccagtcagaacctcttcaagctggccaacccgctggtggaccagtacttgtaccgcttcgtgagcacaaataacactggcggagtccagttcaacaagaacctggccgggagatacgccaacacctacaaaaactggttcccggggcccatgggccgaacccagggctggaacctgggctccggggtcaaccgcgccagtgtcagcgccttcgccacgaccaataggatggagctcgagggcgcgagttaccaggtgcccccgcagccgaacggcatgaccaacaacctccagggcagcaacacctatgccctggagaacactatgatcttcaacagccagccggcgaacccgggcaccaccgccacgtacctcgagggcaacatgctcatcaccagcgagagcgagacgcagccggtgaaccgcgtggcgtacaacgtcggcgggcagatggccaccaacaaccagagctccaccactgcccccgcgaccggcacgtacaacctccaggaaatcgtgcccggcagcgtgtggatggagagggacgtgtacctccaaggacccatctgggccaagatcccagagacgggggcgcactttcacccctctccggccatgggcggattcggactcaaacacccaccgcccatgatgctcatcaagaacacgcctgtgcccggaaatatcaccagcttctcggacgtgcccgtcagcagcttcatcacccagtacagcaccgggcaggtcaccgtggagatggagtgggagctcaagaaggaaaactccaagaggtggaacccagagatccagtacacaaacaactacaacgacccccagtttgtggactttgccccggacagcaccggggaatacagaaccaccagacctatcggaacccgataccttacccgacccctttaa

SEQ ID NO: 3192 - DNA, 2175 bp, Artificial Sequence
  Synthetic polynucleotide
atgtcttttgttgatcaccctccagattggttggaagaagttggtgaaggtcttcgcgagtttttgggccttgaagcgggcccaccgaaaccaaaacccaatcagcagcatcaagatcaagcccgtggtcttgtgctgcctggttataactatctcggacccggaaacggtctcgatcgaggagagcctgtcaacagggcagacgaggtcgcgcgagagcacgacatctcgtacaacgagcagcttgaggcgggagacaacccctacctcaagtacaaccacgcggacgccgagtttcaggagaagctcgccgacgacacatccttcgggggaaacctcggaaaggcagtctttcaggccaagaaaagggttctcgaaccttttggcctggttgaagagggtgctaagacggcccctaccggaaagcggatagacgaccactttccaaaaagaaagaaggcccggaccgaagaggactccaagccttccacctcgtcagacgccgaagctggacccagcggatcccagcagctgcaaatcccagcccaaccagcctcaagtttgggagctgatacaatgtctgcgggaggtggcggcccattgggcgacaataaccaaggtgccgatggagtgggcaatgcctcgggagattggcattgcgattccacgtggatgggggacagagtcgtcaccaagtccacccgaacctgggtgctgcccagctacaacaaccaccagtaccgagagatcaaaagcggctccgtcgacggaagcaacgccaacgcctactttggatacagcaccccctgggggtactttgactttaaccgcttccacagccactggagcccccgagactggcaaagactcatcaacaactactggggcttcagaccccggtccctcagagtcaaaatcttcaacattcaagtcaaagaggtcacggtgcaggactccaccaccaccatcgccaacaacctcacctccaccgtccaagtgtttacggacgacgactaccagctgccctacgtcgtcggcaacgggaccgagggatgcctgccggccttccctccgcaggtctttacgctgccgcagtacggttacgcgacgctgaaccgcgacaacacagaaaatcccaccgagaggagcagcttcttctgcctagagtactttcccagcaagatgctgagaacgggcaacaactttgagtttacctacaactttgaggaggtgcccttccactccagcttcgctcccagtcagaacctcttcaagctggccaacccgctggtggaccagtacttgtaccgcttcgtgagcacaaataacactggcggagtccagttcaacaagaacctggccgggagatacgccaacacctacaaaaactggttcccggggcccatgggccgaacccagggctggaacctgggctccggggtcaaccgcgccagtgtcagcgccttcgccacgaccaataggatggagctcgagggcgcgagttaccaggtgcccccgcagccgaacggcatgaccaacaacctccagggcagcaacacctatgccctggagaacactatgatcttcaacagccagccggcgaacccgggcaccaccgccacgtacctcgagggcaacatgctcatcaccagcgagagcgagacgcagccggtgaaccgcgtggcgtacaacgtcggcgggcagatggccaccaacaaccagagctccaccactgcccccgcgaccggcacgtacaacctccaggaaatcgtgcccggcagcgtgtggatggagagggacgtgtacctccaaggacccatctgggccaagatcccagagacgggggcgcactttcacccctctccggccatgggcggattcggactcaaacacccaccgcccatgatgctcatcaagaacacgcctgtgcccggaaatatcaccagcctctcggacgtgcccgtcagcagcttcatcacccagtacagcaccgggcaggtcaccgtggagatggagtgggagctcaagaaggaaaactccaagaggtggaacccagagatccagtacacaaacaactacaacgacccccagtttgtggactttgccccggacagcaccggggaatacagaaccaccagacctatcggaacccgataccttacccgacccctttaa

SEQ ID NO: 3193 - DNA, 2175 bp, Artificial Sequence
  Synthetic polynucleotide
atgtcttttgttgatcaccctccagattggttggaagaagttggtgaaggtcttcgcgagtttttgggccttgaagcgggcccaccgaaaccaaaacccaatcagcagcatcaagatcaagcccgtggtcttgtgctgcctggttataactatctcggacccggaaacggtctcgatcgaggagagcctgccaacagggcagacgaggtcgcgcgagagcacgacatctcgtacaacgagcagcttgaggcgggagacaacccctacctcaagtacaaccacgcgggcgccgagtttcaggagaagctcgccgacgacacatccttcgggggaaacctcggaaaggcagtctttcaggccaagaaaagggttctcgaaccttttggcctggttgaagagggtgctaagacggcccctaccggaaagcggatagacgaccactttccaaaaagaaagaaggcccggaccgaagaggactccaagccttccacctcgtcagacgccgaagctggacccagcggatcccagcagctgcaaatcccagcccaaccagcctcaagtttgggagctgatacaatgtctgcgggaggtggcggcccattgggcgacaataaccaaggtgccgatggagtgggcaatgcctcgggagattggcattgcgattccacgtggatgggggacagagtcgtcaccaagtccacccgaacctgggtgctgcccggctacaacaaccaccagtaccgagagatcaaaagcggctccgtcgacggaagcaacgccaacgcctactttggatacagcaccccctgggggtactttgactttaaccgcttccacagccactggagcccccgagactggcaaagactcatcaacaactactggggcttcagaccccggtccctcagagtcaaaatcttcaacattcaagtcaaagaggtcacggtgcaggactccaccaccaccatcgccaacaacctcacctccaccgtccaagtgtttacggacgacgactaccagctgccctacgtcgtcggcaacgggaccgagggatgcctgccggccttccctccgcaggtctttacgctgccgcagtacggttacgcgacgctgaaccgcgacaacacagaaaatcccaccgagaggagcagcttcttctgcctagagtactttcccagcaagatgctgagaacgggcaacaactttgagtttacctacaactttgaggaggtgcccttccactccagcttcgctcccagtcagaacctcttcaagctggccaacccgctggtggaccagtacttgtaccgcttcgtgagcacaaataatactggcggagtccagttcaacaagaacctggccgggagatacgccaacacctacaaaaactggttcccggggcccatgggccgaacccagggctggaacctgggctccggggtcaaccgcgccagtgtcagcgccttcgccacgaccaataggatggagctcgagggcgcgagttaccaggtgcccccgcagccgaacggcatgaccaacaacctccagggcagcaacacctatgccctggagaacactatgatcttcaacagccagccggcgaacccgggcaccaccgccacgtacctcgagggcaacatgctcatcaccagcgagagcgagacgcagccggtgaaccgcgtggcgtacaacgtcggcgggcagatggccaccaacaaccagagctccaccactgcccccgcgaccggcacgtacaacctccaggaaatcgtgcccggcagcgtgtggatggagagggacgtgtacctccaaggacccatctgggccaagatcccagagacgggggcgcactttcacccctctccggccatgggcggattcggactcaaacacccaccgcccatgatgctcatcaagaacacgcctgtgcccggaaatatcaccagcttctcggacgtgcccgtcagcagcttcatcacccagtacagcaccgggcaggtcaccgtggagatggagtgggagctcaagaaggaaaactccaagaggtggaacccagagatccagtacacaaacaactacaacgacccccagtttgtggactttgccccggacagcaccggggaatacagaaccaccagacctatcggaacccgataccttacccgacccctttaa

SEQ ID NO: 3194 - DNA, 2175 bp, Artificial Sequence
  Synthetic polynucleotide
atgtcttttgttgatcaccctccagattggttggaagaagttggtgaaggtcttcgcgagtttttgggccttgaagcgggcccaccgaaaccaaaacccaatcagcagcatcaagatcaagcccgtggtcttgtgctgcctggttataactatctcggacccggaaacggtctcgatcgaggagagcctgtcaacagggcagacgaggtcgcgcgagagcacgacatctcgtacaacgagcagcttgaggcgggagacaacccctacctcaagtacaaccacgcggacgccgagtttcaggagaagctcgccgacgacacatccttcgggggaaacctcggaaaggcagtctttcaggccaagaaaagggttctcgaaccttttggcctggttgaagagggtgctaagacggcccctaccggaaagcggatagacgaccactttccaaaaagaaagaaggcccggaccgaagaggactccaagcctcccacctcgtcagacgccgaagctggacccagcggatcccagcagctgcaaatcccagcccaaccagcctcaagtttgggagctgatacaatgtctgcgggaggtggcggcccattgggcgacaataaccaaggtgccgatggagtgggcaatgcctcgggagattggcattgcgattccacgtggatgggggacagagtcgtcaccaagtccacccgaacctgggtgctgcccagctacaacaaccaccagtaccgagagatcaaaagcggctccgtcgacggaagcaacgccaacgcctactttggatacagcaccccctgggggtactttgactttaaccgcttccacagccactggagcccccgagactggcaaagactcatcaacaactactggggcttcagaccccggtccctcagagtcaaaatcttcaacattcaagtcaaagaggtcacggtgcaggactccgccaccaccatcgccaacaacctcacctccaccgtccaagtgtttacggacgacgactaccagctgccctacgtcgtcggcaacgggaccgagggatgcctgccggccttccctccgcaggtctttacgctgccgcagtacggttacgcgacgctgaaccgcgacaacacagaaaatcccaccgagaggagcagcttcttctgcctagagtactttcccagcaagatgctgagaacgggcaacaactttgagtttacctacaactttgaggaggtgcccttccactccagcttcgctcccagtcagaacctcttcaagctggccaacccgctggtggaccagtacttgtaccgcttcgtgagcacaaataacactggcggagtccagttcaacaagaacctggccgggagatacgccaacacctacaaaaactggttcccggggcccatgggccgaacccagggctggaacctgggctccggggtcaaccgcgccagtgtcagcgccttcgccacgaccaataggatggagctcgagggcgcgagttaccaggtgcccccgcagccgaacggcatgaccaacaacctccagggcagcaacacctatgccctggagaacactatgatcttcaacagccagccggcgaacccgggcaccaccgccacgtacctcgagggcaacatgctcatcaccagcgagagcgagacgcagccggtgaaccgcgtggcgtacaacgtcggcgggcagatggccaccaacaaccagagctccaccactgcccccgcgaccggcacgtacaacctccaggaaatcgtgcccggcagcgtgtggatggagagggacgtgtacctccaaggacccatctgggccaagatcccagagacgggggcgcactttcacccctctccggccatgggcggattcggactcaaacacccaccgcccatgatgctcatcaagaacacgcctgtgcccggaaatatcaccagcttctcggacgtgcccgtcagcagcttcatcacccagtacagcaccgggcaggtcaccgtggagatggagtgggagctcaagaaggaaaactccaagaggtggaacccagagatccagtacacaaacaactacaacgacccccagtttgtggactttgccccggacagcaccggggaatacagaaccaccagacctatcggaacccgataccttacccgacccctttaa

SEQ ID NO: 3195 - DNA, 2175 bp, Artificial Sequence
  Synthetic polynucleotide
atgtcttttgttgatcaccctccagattggttggaagaagttggtgaaggtcttcgcgagtttttgggccttgaagcgggcccaccgaaaccaaaacccaatcagcagcatcaagatcaagcccgtggtcttgtgctgcctggttataactatctcggacccggaaacggtctcgatcgaggagagcctgtcaacagggcagacgaggtcgcgcgagagcacgacatctcgtacaacgagcagcttgaggcgggagacaacccctacctcaagtacaaccacgcggacgccgagtttcaggagaagctcgccgacgacacatccttcgggggaaacctcggaaaggcagtctttcaggccaagaaaagggttctcgaaccttttggcctggttgaagagggtgctaagacggcccctaccggaaagcggatagacgaccactttccaaaaagaaagaaggcccggaccgaagaggactccaagccttccacctcgtcagacgccgaagctggacccagcggatcccagcagccgcaaatcccagcccaaccagcctcaagtttgggagctgatacaatgtctgcgggaggtggcggcccattgggcgacaataaccaaggtgccgatggagtgggcaatgcctcgggagattggcattgcgattccacgtggatgggggacagagtcgtcaccaagtccacccgaacctgggtgctgcccagctacaacaaccaccagtaccgagagatcaaaagcggctccgtcgacggaagcaacgccaacgcctactttggatacagcaccccctgggggtactttgactttaaccgcttccacagccactggagcccccgagactggcaaagactcatcaacaactactggggcttcagaccccggtccctcagagtcaaaatcttcaacattcaagtcaaagaggtcacggtgcaggactccaccaccaccatcgccaacaacctcacctccaccgtccaagtgtttacggacgacgactaccagctgccctacgtcgtcggcaacgggaccgagggatgcctgccggccttccctccgcaggtctttacgctgccgcagtacggttacgcgacgctgaaccgcgacaacacagaaaatcccaccgagaggagcagcttcttctgcctagagtactttcccagcaagatgctgagaacgggcaacaactttgagtttacctacaactttgaggaggtgcccttccactccagcttcgctcccagtcagaacctcttcaagctggccaacccgctggtggaccagtacttgtaccgcttcgtgagcacaaataacactggcggagtccagttcaacaagaacctggccgggagatacgccaacacctacaaaaactggttcccggggcccatgggccgaacccagggctggaacctgggctccggggtcaaccgcgccagtgtcagcgccttcgccacgaccaataggatggagctcgagggcgcgagttaccaggtgcccccgcagccgaacggcatgaccaacaacctccagggcagcaacacctatgccctggagaacactatgatcttcaacagccagccggcgaacccgggcaccaccgccacgtacctcgagggcaacatgctcatcaccagcgagagcgagacgcagccggtgaaccgcgtggcgtacaacgtcggcgggcagatggccaccaacaaccagagctccaccactgcccccgcgaccggcacgtacaacctccaggaaatcgtgcccggcagcgtgtggatggagagggacgtgtacctccaaggacccatctgggccaagatcccagagacgggggcgcactttcacccctctccggccatgggcggattcggactcaaacacccaccgcccatgatgctcatcaagaacacgcctgcgcccggaaatatcaccagcttctcggacgtgcccgtcagcagcttcatcacccagtacagcaccgggcaggtcaccgtggagatggagtgggagctcaagaaggaaaactccaagaggtggaacccagagatccagtacacaaacaactacaacgacccccagtttgtggactttgccccggacagcaccggggaatacagaaccaccagacctatcggaacccgataccttacccgacccctttaa

SEQ ID NO: 3196 - DNA, 2175 bp, Artificial Sequence
  Synthetic polynucleotide
atgtcttttgttgatcaccctccagattggttggaagaagttggtgaaggtcttcgcgagtttttgggccttgaagcgggcccaccgaaaccaaaacccaatcagcagcatcaagatcaagcccgtggtcttgtgctgcctggttataactatctcggacccggaaacggtctcgatcgaggagagcctgtcaacagggcagacgaggtcgcgcgagagcacgacatctcgtacaacgagcagcttgaggcgggagacaacccctacctcaagtacaaccacgcggacgccgagtttcaggagaagctcgccgacgacacatccttcgggggaaacctcggaaaggcagtctttcaggccaagaaaagggttctcgaaccttttggcctggttgaagagggtgctaagacggcccctaccggaaagcggatagacgaccactttccaaaaagaaagaaggcccggaccgaagaggactccaagcctcccacctcgtcagacgccgaagctggacccagcggatcccagcagctgcaaatcccagcccaaccagcctcaagtttgggagctgatacaatgtctgcgggaggtggcggcccattgggcgacaataaccaaggtgccgatggagtgggcaatgcctcgggagattggcattgcgattccacgtggatgggggacagagtcgtcaccaagtccacccgaacctgggtgctgcccagctacaacaaccaccagtaccgagagatcaaaagcggctccgtcgacggaagcaacgccaacgcctactttggatacagcaccccctgggggtactttgactttaaccgcttccacagccactggagcccccgagactggcaaagactcatcaacaactactggggcttcagaccccggtccctcagagtcaaaatcttcaacattcaagtcaaagaggtcacggtgcaggactccaccaccaccatcgccaacaacctcacctccaccgtccaagtgtttacggacgacgactaccagctgccctacgtcgtcggcaacgggaccgagggatgcctgccggccttccctccgcaggtctttacgctgccgcagtacggttacgcgacgctgaaccgcgacaacacagaaaatcccaccgagaggagcagcttcttctgcctagagtactttcccagcaagatgctgagaacgggcaacaactttgagtttacctacaactttgaggaggtgcccttccactccagcttcgctcccagtcagaacctcttcaagctggccaacccgctggtggaccagtacttgtaccgcttcgtgagcacaaataacactggcggagtccagttcaacaagaacctggccgggagatacgccaacacctacaaaaactggttcccggggcccatgggccgaacccagggctggaacctgggctccggggtcaaccgcgccagtgtcagcgccttcgccacgaccaataggatggagctcgagggcgcgagttaccaggtgcccccgcagccgaacggcatgaccaacaacctccagggcagcaacacctatgccctggagaacactatgatcttcaacagccagccggcgaacccgggcaccaccgccacgtacctcgagggcaacatgctcatcaccagcgagagcgagacgcagccggtgaaccgcgtggcgtacaacgtcggcgggcagatggccaccaacaaccagagctccaccactgcccccgcgaccggcacgtacaacctccaggaaatcgtgcccggcagcgtgtggatggagagggacgtgtacctccaaggacccatctgggccaagatcccagagacgggggcgcactttcacccctctccggccatgggcggattcggactcaaacacccaccgcccatgatgctcatcaagaacacgcctgtgcccggaaatatcaccagcttctcggacgtgcccgtcagcagcttcatcacccagtacagcaccgggcaggtcaccgtggagatggagtgggagctcaagaaggaaaactccaagaggtggaacccagagatccagtacacaaacaactacaacgacccccagtttgtggactttgccccggacagcaccggggaatacagaaccaccagacctatcggaacccgataccttacccgacccctttaa

SEQ ID NO: 3197 - DNA, 2175 bp, Artificial Sequence
  Synthetic polynucleotide
atgtcttttgttgatcaccctccagattggttggaagaagttggtgaaggtcttcgcgagtttttgggccttgaagcgggcccaccgaaaccaaaacccaatcagcagcatcaagatcaagcccgtggtcttgtgctgcctggttataactatctcggacccggaaacggtctcgatcgaggagagcctgtcaacagggcagacgaggtcgcgcgagagcacgacatctcgtacaacgagcagcttgaggcgggagacaacccctacctcaagtacaaccacgcggacgccgagtttcaggagaagctcgccgacgacacatccttcgggggaaacctcggaaaggcagtctttcaggccaagaaaagggttctcgaaccttttggcctggttgaagagggtgctaagacggcccctaccggaaagcggatagacgaccactttccaaaaagaaagaaggcccggaccgaagaggactccaagcctcccacctcgtcagacgccgaagctggacccagcggatcccagcagctgcaaatcccagcccaaccagcctcaagtttgggagctgatacaatgtctgcgggaggtggcggcccattgggcgacaataaccaaggtgccgatggagtgggcaatgcctcgggagattggcattgcgattccacgtggatgggggacagagtcgtcaccaagtccacccgaacctgggtgccgcccagctacaacaaccaccagtaccgagagatcaaaagcggctccgtcgacggaagcaacgccaacgcctactttggatacagcaccccctgggggtactttgactttaaccgcttccacagccactggagcccccgagactggcaaagactcatcaacaactactggggcttcagaccccggtccctcagagtcaaaatcttcaacattcaagtcaaagaggtcacggtgcaggactccaccaccaccatcgccaacaacctcacctccaccgtccaagtgtttacggacgacgactaccagctgccctacgtcgtcggcaacgggaccgagggatgcctgccggccttccctccgcaggtctttacgctgccgcagtacggttacgcgacgctgaaccgcgacaacacagaaaatcccaccgagaggagcagcttcttctgcctagagtactttcccagcaagatgctgagaacgggcaacaactttgagtttacctacaactttgaggaggtgcccttccactccagcttcgctcccagtcagaacctcttcaagctggccaacccgctggtggaccagtacttgtaccgcttcgtgagcacaaataacactggcggagtccagttcaacaagaacctggccgggagatacgccaacacctacaaaaactggttcccggggcccatgggccgaacccagggctggaacctgggctccggggtcaaccgcgccagtgtcagcgccttcgccacgaccaataggatggagctcgagggcgcgagttaccaggtgcccccgcagccgaacggcatgaccaacaacctccagggcagcaacacctatgccctggagaacactatgatcttcaacagccagccggcgaacccgggcaccaccgccacgtacctcgagggcaacatgctcatcaccagcgagagcgagacgcagccggtgaaccgcgtggcgtacaacgtcggcgggcagatggccaccaacaaccagagctccaccactgcccccgcgaccggcacgtacaacctccaggaaatcgtgcccggcagcgtgtggatggagagggacgtgtacctccaaggacccatctgggccaagatcccagagacgggggcgcactttcacccctctccggccatgggcggattcggactcaaacacccaccgcccatgatgctcatcaagaacacgcctgtgcccggaaatatcaccagcttctcggacgtgcccgtcagcagcttcatcacccagtacagcaccgggcaggtcgccgtggagatggagtgggagctcaagaaggaaaactccaagaggtggaacccagagatccagtacacaaacaactacaacgacccccagtttgtggactttgccccggacagcaccggggaatacagaaccaccagacctatcggaacccgataccttacccgacccctttaa

SEQ ID NO: 3198 - DNA, 2175 bp, Artificial Sequence
  Synthetic polynucleotide
atgtcttttgttgatcaccctccagattggttggaagaagttggtgaaggtcttcgcgagtttttgggccttgaagcgggcccaccgaaaccaaaacccaatcagcagcatcaagatcaagcccgtggtcttgtgctgcctggttataactatctcggacccggaaacggtctcgatcgaggagagcctgtcaacagggcagacgaggtcgcgcgagagcacgacatctcgtacaacgagcagcttgaggcgggagacaacccctacctcaagtacaaccacgcggacgccgagtttcaggagaagctcgccgacgacacatccttcgggggaaacctcggaaaggcagtctttcaggccaagaaaagggttctcgaaccttttggcctggttgaagagggtgctaagacggcccctaccggaaagcggatagacgaccactttccaaaaagaaagaaggcccggaccgaagaggactccaagccttccacctcgtcagacgccgaagctggacccagcggatcccagcagctgcaaatcccagcccaaccagcctcaagtttgggagctgatacaatgtctgcgggaggtggcggcccattgggcgacaataaccaaggtgccgatggagtgggcaatgcctcgggagattggcattgcgattccacgtggatgggggacagagtcgtcaccaagtccacccgaacctgggtgctgcccagctacaacaaccaccagtaccgagagatcaaaagcggctccgtcgacggaagcaacgccaacgcctactttggatacagcaccccctgggggtactttgactttaaccgcttccacagccactggagcccccgagactggcaaagactcatcaacaactactggggcttcagaccccggtccctcagagtcaaaatcttcaacattcaagtcaaagaggtcacggtgcaggactccaccaccaccatcgccaacaacctcacctccaccgtccaagtgtttacggacgacgactaccagctgccctacgtcgtcggcaacgggaccgagggatgcctgccggccttccctccgcaggtctttacgctgccgcagtacggttacgcgacgctgaaccgcgacaacacagaaaatcccaccgagaggagcagcttcttctgcctagagtactttcccagcaagatgctgagaacgggcaacaactttgagtttacctacaactttgaggaggtgcccttccactccagcttcgctcccagtcagaacctcttcaagctggccaacccgctggtggaccagtacttgtaccgcttcgtgagcacaaataacactggcggagtccagttcaacaagaacctggccgggagatacgccaacacctacaaaaactggttcccggggcccatgggccgaacccagggctggaacctgggctccggggtcaaccgcgccagtgtcagcgccttcgccacgaccaataggatggagctcgagggcgcgagttaccaggtgcccccgcagccgaacggcatgaccaacaacctccagggcagcaacacctatgccctggagaacactatgatcttcaacagccagccggcgaacccgggcaccaccgccacgtacctcgagggcaacatgctcatcaccagcgagagcgagacgcagccggtgaaccgcgtggcgtacaacgtcggcgggcagatggccaccaacaaccagagctccaccactgcccccgcgaccggcacgtacaacctccaggaaatcgtgcccggcagcgtgtggatggagagggacgtgtacctccaaggacccatctgggccaagatcccagagacgggggcgcactttcacccctctccggccatgggcggattcggactcaaacacccaccgcccatgatgctcatcaagaacacgcctgcgcccggaaatatcaccagcttctcggacgtgcccgtcagcagcttcatcacccagtacagcaccgggcaggtcaccgtggagatggagtgggagctcaagaaggaaaactccaagaggtggaacccagagatccagtacacaaacaactacaacgacccccagtttgtggactttgccccggacagcaccggggaatacagaaccaccagacctatcggaacccgataccttacccgacccctttaa

SEQ ID NO: 3199 - DNA, 2175 bp, Artificial Sequence
  Synthetic polynucleotide
atgtcttttgttgatcaccctccagattggttggaagaagttggtgaaggtcttcgcgagtttttgggccttgaagcgggcccaccgaaaccaaaacccaatcagcagcatcaagatcaagcccgtggtcttgtgctgcctggttataactatctcggacccggaaacggtctcgatcgaggagagcctgtcaacagggcagacgaggtcgcgcgagagcacgacatctcgtacaacgagcagcttgaggcgggagacaacccctacctcaagtacaaccacgcggacgccgagtttcaggagaagctcgccgacgacacatccttcgggggaaacctcggaaaggcagtctttcaggccaagaaaagggttctcgaaccttttggcctggctgaagagggtgctaagacggcccctaccggaaagcggatagacgaccactttccaaaaagaaagaaggcccggaccgaagaggactccaagccttccacctcgtcagacgccgaagctggacccagcggatcccagcagctgcaaatcccagcccaaccagcctcaagtttgggagctgatacaatgtctgcgggaggtggcggcccattgggcgacaataaccaaggtgccgatggagtgggcaatgcctcgggagattggcattgcgattccacgtggatgggggacagagtcgtcaccaagtccacccgaacctgggtgctgcccagctacaacaaccaccagtaccgagagatcaaaagcggctccgtcgacggaagcaacgccaacgcctactttggatacagcaccccctgggggtactttgactttaaccgcttccacagccactggagcccccgagactggcaaagactcatcaacaactactggggcttcagaccccggtccctcagagccaaaatcttcaacattcaagtcaaagaggtcacggtgcaggactccaccaccaccatcgccaacaacctcacctccaccgtccaagtgtttacggacgacgactaccagctgccctacgtcgtcggcaacgggaccgagggatgcctgccggccttccctccgcaggtctttacgctgccgcagtacggttacgcgacgctgaaccgcgacaacacagaaaatcccaccgagaggagcagcttcttctgcctagagtactttcccagcaagatgctgagaacgggcaacaaccttgagtttacctacaactttgaggaggtgcccttccactccagcttcgctcccagtcagaacctcttcaagctggccaacccgctggtggaccagtacttgtaccgcttcgtgagcacaaataacactggcggagtccagttcaacaagaacctggccgggagatacgccaacacctacaaaaactggttcccggggcccatgggccgaacccagggctggaacctgggctccggggtcaaccgcgccagtgtcagcgccttcgccacgaccaataggatggagctcgagggcgcgagttaccaggtgcccccgcagccgaacggcatgaccaacaacctccagggcagcaacacctatgccctggagaacactatgatcttcaacagccagccggcgaacccgggcaccaccgccacgtacctcgagggcaacatgctcatcaccagcgagagcgagacgcagccggtgaaccgcgtggtgcacaacgtcggcgggcagatggccaccaacaaccagagctccaccactgcccccgcgaccggcacgtacaacctccaggaaatcgtgcccggcagcgtgtggatggagagggacgtgtacctccaaggacccatctgggccaagatcccagagacgggggcgcactttcacccctctccggccatgggcggattcggactcaaacacccaccgcccatgatgctcatcaagaacacgcctgtgcccggaaatatcaccagcttctcggacgtgcccgtcagcagcttcatcacccagtacagcaccgggcaggtcaccgtggagatggagtgggagctcaagaaggaaaactccaagaggtggaacccggagatccagtacacaaacaactacaacgacccccagtttgtggactttgccccggacagcaccggggaatacagaaccaccagacctatcggaacccgataccttacccgacccctttaa

SEQ ID NO: 3200 - DNA, 2175 bp, Artificial Sequence
  Synthetic polynucleotide
atgtcttttgttgatcaccctccagattggttggaagaagttggtgaaggtcttcgcgagtttttgggccttgaagcgggcccaccgaaaccaaaacccaatcagcagcatcaagatcaagcccgtggtcttgtgctgcctggttataactatctcggacccggaaacggtctcgatcgaggagagcctgtcaacagggcagacgaggtcgcgcgagagcacgacatctcgtacaacgagcagcttgaggcgggagacaacccctacctcaagtacaaccacgcggacgccgagtttcaggagaagctcgccgacgacacatccttcgggggaaacctcggaaaggcagtctttcaggccaagaaaagggttctcgaaccttttggcctggttgaagagggtgctaagacggcccctaccggaaagcggatagacgaccactttccaaaaagaaagaaggcccggaccgaagaggactccaagccttccacctcgtcagacgccgaagctggacccagcggatcccagcagctgcaaatcccagcccaaccagcctcaagtttgggagctgatacaatgtctgcgggaggtggcggcccattgggcgacaataaccaaggtgccgatggagtgggcaatgcctcgggagattggcattgcgattccacgtggatgggggacagagtcgtcaccaagtccacccgaacctgggtgctgcccagctacaacaaccaccagtaccgagagatcaaaagcggctccgtcgacggaggcaacgccaacgcctactttggatacagcaccccctgggggtactttgactttaaccgcttccacagccactggagcccccgggactggcaaagactcatcaacaactactggggcttcagaccccggtccctcagagtcaaaatcttcaacattcaagtcaaagaggtcacggtgcaggactccaccaccaccatcgccaacaacctcacctccaccgtccaagtgtttacggacgacgactaccagctgccctacgtcgtcggcaacgggaccgagggatgcctgccggccttccctccgcaggtctttacgctgccgcagtacggttacgcgacgctgaaccgcgacaacacagaaaatcccaccgagaggagcagcttcttctgcctagagtactttcccagcaagatgctgagaacgggcaacaactttgagtttacctacaactttgaggaggtgcccttccactccagcttcgctcccagtcagaacctcttcaagctggccaacccgctggtggaccagtacttgtaccgcttcgtgagcacaaataacactggcggagtccagttcaacaagaacctggccgggagatacgccaacacctacaaaaactggttcccggggcccatgggccgaacccagggctggaacctgggctccggggtcaaccgcgccagtgtcagcgccttcgccacgaccaataggatggagctcgagggcgcgagttaccaggtgcccccgcagccgaacggcatgaccaacaacctccagggcagcaacacctatgccctggagaacactatgatcttcaacagccagccggcgaacccgggcaccaccgccacgtacctcgagggcaacatgctcatcaccagcgagagcgagacgcagccggtgaaccgcgtggcgtacaacgtcggcgggcagatggccaccaacaaccagagctccaccactgcccccgcgaccggcacgtacaacctccaggaaatcgtgcccggcagcgtgtggatggagagggacgtgtacctccaaggacccatctgggccaagatcccagagacgggggcgcactttcacccctctccggccatgggcggattcggactcaaacacccaccgcccatgatgctcatcaagaacacgcctgcgcccggaaatatcaccagcttctcggacgtgcccgtcagcagcttcatcacccagtacagcaccgggcaggtcaccgtggagatggagtgggagctcaagaagggaaactccaagaggtggaacccagagatccagtacacaaacaactacaacgacccccagtttgtggactttgccccggacagcaccggggaatacagaaccaccagacctatcggaacccgataccttacccgacccctttaa

SEQ ID NO: 3201 - DNA, 2175 bp, Artificial Sequence
  Synthetic polynucleotide
atgtcttttgttgatcaccctccagattggttggaagaagttggtgaaggtcttcgcgagtttttgggccttgaagcgggcccaccgaaaccaaaacccaatcagcagcatcaagatcaagcccgtggtcttgtgctgcctggttataactatctcggacccggaaacggtctcgatcgaggagagcctgtcaacagggcagacgaggtcgcgcgagagcacgacatctcgtacaacgagcagcttgaggcgggagacaacccctacctcaagtacaaccacgcggacgccgagtttcaggagaagctcgccgacgacacgtccttcgggggaaacctcggaaaggcagtctttcaggccaagaaaagggttctcgaaccttttggcctggttgaagagggtgctaagacggcccctaccggaaagcggatagacgaccactttccaaaaagaaagaaggcccggaccgaagaggactccaagccttccacctcgtcagacgccgaagctggacccagcggatcccagcagctgcaaatcccagcccaaccagcctcaagtttgggagctgatacaatgtctgcgggaggtggcggcccattgggcgacaataaccaaggtgccgatggagtgggcaatgcctcgggagattggcattgcgattccacgtggatgggggacagagtcgtcaccaagtccacccgaacctgggtgctgcccagctacaacaaccaccagtaccgagagatcaaaagcggctccgtcgacggaagcaacgccaacgcctactttggatacagcaccccctgggggtactttgactttaaccgcttccacagccactggagcccccgagactggcaaagactcatcaacaactactggggcttcagaccccggtccctcagagtcaaaatcttcaacattcaagtcaaagaggtcacggtgcaggactccaccaccaccatcgccaacaacctcacctccaccgtccaagtgtttacggacgacgactaccagctgccctacgtcgtcggcaacgggaccgagggatgcctgccggccttccctccgcaggtctttacgctgccgcagtacggttacgcgacgctgaaccgcgacaacacagaaaatcccaccgagaggagcagcttcttctgcctagagtactttcccagcaagatgctgagaacgggcaacaactttgagtttacctacaactttgaggaggtgcccttccactccagcttcgctcccagtcagaacctcttcaagctggccaacccgctggtggaccagtacttgtaccgcttcgtgagcacaaataacactggcggagtccagttcaacaagaacctggccgggagatacgccaacacctacaaaaactggttcccggggcccatgggccgaacccagggctggaacctgggctccggggtcaaccgcgccagtgtcagcgccttcgccacgaccaataggatggagctcgagggcgcgagttaccaggtgcccccgcagccgaacggcatgaccaacaacctccagggcagcaacacctatgccctggagaacactatgatcttcaacagccagccggcgaacccgggcaccaccgccacgtacctcgagggcaacatgctcatcaccagcgagagcgagacgcagccggtgaaccgcgtggcgtacaacgtcggcgggcagatggccaccaacaaccagagctccaccactgcccccgcgaccggcacgtacaacctccaggaaatcgtgcccggcagcgtgtggatggagagggacgtgtacctccaaggacccatctgggccaagatcccagagacgggggtgcactttcacccctctccggccatgggcggattcggactcaaacacccaccgcccatgatgctcatcaagaacacgcctgtgcccggaaatatcaccagcttctcggacgtgcccgtcagcagcttcatcacccagtacagcaccgggcaggtcaccgtggagatggagtgggagctcaagaaggaaaactccaagaggtggaacccagagatccagtacacaaacaactacaacgacccccagtttgtggactttgccccggacagcaccggggaatacagaaccaccagacctatcggaacccgataccttacccgacccctttaa

SEQ ID NO: 3202 - DNA, 2175 bp, Artificial Sequence
  Synthetic polynucleotide
  modified_base (1652)..(1652): a, c, g, or t
  misc_feature (1652)..(1652): n is a, c, g, or t
atgtcttttgttgatcaccctccagattggttggaagaagttggtgaaggtcttcgcgagtttttgggccttgaagcgggcccaccgaaaccaaaacccaatcagcagcatcaagatcaagcccgtggtcttgtgctgcctggttataactatctcggacccggaaacggtctcgatcgaggagagcctgtcaacagggcagacgaggtcgcgcgagagcacgacatctcgtacaacgagcagcttgaggcgggagacaacccctacctcaagtacaaccacgcggacgccgagtttcaggagaagctcgccgacgacacatccttcgggggaaacctcggaaaggcagtctttcaggccaagaaaagggttctcgaaccttttggcctggttgaagagggtgctaagacggcccctaccggaaagcggatagacgaccactttccaaaaagaaagaaggcccggaccgaggaggactccaagccttccacctcgtcagacgccgaagctggacccagcggatcccagcagctgcaaatcccagcccaaccagcctcaagtttgggagctgatacaatgtctgcgggaggtggcggcccattgggcgacaataaccaaggtgccgatggagtgggcaatgcctcgggagattggcattgcgattccacgtggatgggggacagagtcgtcaccaagtccacccgaacctgggtgctgcccagctacaacaaccaccagtaccgagagatcaaaagcggctccgtcgacggaagcaacgccaacgcctactttggatacagcaccccctgggggtactttgactttaaccgcttccacagccactggagcccccgagactggcaaagactcatcaacaactactggggcttcagaccccggtccctcagagtcaaaatcttcaacattcaagtcaaagaggtcacggtgcaggactccaccaccaccatcgccaacaacctcacctccaccgtccaagtgtttacggacgacgactaccagctgccctacgtcgtcggcaacgggaccgagggatgcctgccggccttccctccgcaggtctttacgctgccgcagtacggttacgcgacgctgaaccgcgacaacacagaaaatcccaccgagaggagcagcttcttctgcctagagtactttcccagcaagatgctgagaacgggcaacaactttgagtttacctacaactttgaggaggtgcccttccactccagcttcgctcccagtcagaacctcttcaagctggccaacccgctggtggaccagtacttgtaccgcttcgtgagcacaaataacactggcggagtccagttcaacaagaacctggccgggagatacgccaacacctacaaaaactggttcccggggcccatgggccgaacccagggctggaacctgggctccggggtcaaccgcgccagtgtcagcgccttcgccacgaccaataggatggagctcgagggcgcgagttaccaggtgcccccgcagccgaacggcatgaccaacaacctccagggcagcaacacctatgccctggagaacactatgatcttcaacagccagccggcgaacccgggcaccaccgccacgtacctcgagggcagcatgctcatcaccancgagagcgagacgcagccggtgaaccgcgtggcgtacaacgtcggcgggcagatggccaccaacaaccagagctccaccactgcccccgcgaccggcacgtacaacctccaggaaatcgtgcccggcagcgtgtggatggagagggacgtgtacctccaaggacccatctgggccaagatcccagagacgggggcgcactttcacccctctccggccatgggcggattcggactcaaacacccaccgcccatgatgctcatcaagaacacgcctgtgcccggaaatatcaccagcttctcggacgtgcccgtcagcagcttcatcacccagtacagcaccgggcaggtcaccgtggagatggagtgggagctcaagaaggaaaactccaagaggtggaacccagagatccagtacacaaacaactacaacgacccccagtttgtggactttgccccggacagcaccggggaatacagaaccaccagacctatcggaacccgataccttacccgacccctttaa

SEQ ID NO: 3203 - DNA, 2211 bp, Artificial Sequence
  Synthetic polynucleotide
atggctgctgacggttatcttccagattggctcgaggacaacctttctgaaggcattcgtgagtggtgggctctgaaacctggagtccctcaacccaaagcgaaccaacaacaccaggacaaccgtcggggtcttgtgcttccgggttacaaatacctcggacccggtaacggactcgacaaaggagagccggtcaacgaggcggacgcggcagccctcgaacacgacaaagcttacgaccagcagctcaaggccggtgacaacccgtacctcaagtacaaccacgccgacgccgagtttcaggagcgtcttcaagaagatacgtcttttgggggcaaccttggcagagcagtcttccaggccaaaaagaggatccttgagcctcttggtctggttgaggaagcagctaaaacggctcctggaaagaagaggcctgtagatcagtctcctcaggaaccggactcatcatctggtgttggcaaatcgggcaaacagcctgccagaaaaagactaaatttcggtcagactggcgactcagagtcagtcccagaccctcaacctctcggagaaccaccagcagcccccacaagtttgggatctaatacaatggcttcaggcggtggcgcaccaatggcagacaataacgagggtgccgatggagtgggtaattcctcaggaaattggcattgcgattcccaatggctgggcgacagagtcatcaccaccagcaccagaacctgggccctgcccacttacaacaaccatctctacaagcaaatctccagccaatcaggagcttcaaacgacaaccactactttggctacagcaccccttgggggtattttgactttaacagattccactgccacttctcaccacgtgactggcagcgactcattaacaacaactggggattccggcccaagaaactcagcttcaagctcttcaacatccaagttaaagaggtcacgcagaacgatggcacgacgactattgccaataaccttaccagcacggttcaagtgtttacggactcggagtatcagctcccgtacgtgctcgggtcggcgcaccaaggctgtctcccgccgtttccagcggacgtcttcatggtccctcagtatggatacctcaccctgaacaacggaagtcaagcggtgggacgctcatccttttactgcctggagtacttcccttcgcagatgctaaggactggaaataacttccaattcagctataccttcgaggatgtaccttttcacagcagctacgctcacagccagagtttggatcgcttgatgaatcctcttattgatcagtatctgtactacctgaacagaacgcaaggaacaacctctggaacaaccaaccaatcacggctgctttttagccaggctgggcctcagtctatgtctttgcaggccagaaattggctacctgggccctgctaccggcaacagagactttcaaagactgctaacgacaacaacaacagtaactttccttggacagcggccagcaaatatcatctcaatggccgcgactcgctggtgaatccaggaccagctatggccagtcacaaggacgatgaagaaaaatttttccctatgcacggcaatctaatatttggcaaagaagggacaacggcaagtaacgcagaattagataatgtaatgattacggatgaagaagagattcgtaccaccaatcctgtggcaacagagcagtatggaactgtggcaaataacttgcagagctcaaatacagctcccacgactagaactgtcaatgatcagggggccttacctggcatggtgtggcaagatcgtgacgtgtaccttcaaggacctatctgggcaaagattcctcacacggatggacactttcatccttctcctctgatgggaggctttggactgaaacatccgcctcctcaaatcatgatcaaaaatactccggtaccggcaaatcctccgacgactttcagcccggccaagtttgcttcatttatcactcagtactccactggacaggtcagcgtggaaattgagtgggagctacagaaagaaaacagcaaacgttggaatccagagattcagtacacttccaactacaacaagtctgttaatgtggactttactgtagacactaatggtgtttatagtgaacctcgccctattggaacccggtatctcacacgaaacttgtaa

SEQ ID NO: 3204 - DNA, 2205 bp, Artificial Sequence; identical to SEQ ID NO: 2472
  Synthetic polynucleotide

SEQ ID NO: 3205 - DNA, 2234 bp, Artificial Sequence
  Synthetic polynucleotide
atgtcttttgttgatcaccctccagattggttggaagaagttggtgaaggtcttcgcgagtttttgggccttgaagcgggcccaccgaaaccaaaacccaatcagcagcatcaagatcaagcccgtggtcttgtgctgcctggttataactatctcggacccggaaacggtctcgatcgaggagagcctgtcaacagggcagacgaggtcgcgcgagagcacgacatctcgtacaacgagcagcttgaggcgggagacaacccctacctcaagtacaaccacgcggacgccgagtttcaggagaagctcgccgacgacacatccttcgggggaaacctcggaaaggcagtctttcaggccaagaaaagggttctcgaaccttttggcctggttgaagagggtgctaagacggcccctaccggaaagcggatagacgaccactttccaaaaagaaagaaggctcggaccgaagaggactccaagccttccacctcgtcagacgccgaagctggacccagcggatcccagcagctgcaaatcccagcccaaccagcctcaagtttgggagctgatacaatgtctgcgggaggtggcggcccattgggcgacaataaccaaggtgccgatggagtgggcaatgcctcgggagattggcattgcgattccacgtggatgggggacagagtcgtcaccaagtccacccgaacctgggtgctgcccagctacaacaaccaccagtaccgagagatcaaaagcggctccgtcgacggaagcaacgccaacgcctactttggatacagcaccccctgggggtactttgactttaaccgcttccacagccactggagcccccgagactggcaaagactcatcaacaactactggggcttcagaccccggtccctcagagtcaaaatcttcaacattcaagtcaaagaggtcacggtgcaggactccaccaccaccatcgccaacaacctcacctccaccgtccaagtgtttacggacgacgactaccagctgccctacgtcgtcggcaacgggaccgagggatgcctgccggccttccctccgcaggtctttacgctgccgcagtacggttacgcgacgctgaaccgcgacaacacagaaaatcccaccgagaggagcagcttcttctgcctagagtactttcccagcaagatgctgagaacgggcaacaactttgagtttacctacaactttgaggaggtgcccttccactccagcttcgctcccagtcagaacctgttcaagctggccaacccgctggtggaccagtacttgtaccgcttcgtgagcacaaataacactggcggagtccagttcaacaagaacctggccgggagatacgccaacacctacaaaaactggttcccggggcccatgggccgaacccagggctggaacctgggctccggggtcaaccgcgccagtgtcagcgccttcgccacgaccaataggatggagctcgagggcgcgagttaccaggtgcccccgcagccgaacggcatgaccaacaacctccagggcagcaacacctatgccctggagaacactatgatcttcaacagccagccggcgaacccgggcaccaccgccacgtacctcgagggcaacatgctcatcaccagcgagagcgagacgcagccggtgaaccgcgtggcgtacaacgtcggcgggcagatggccaccaacaaccagagctccaccactgcccccgcgaccggcacgtacaacctccaggaaatcgtgcccggcagcgtgtggatggagagggacgtgtacctccaaggacccatctgggccaagatcccagagacgggggcgcactttcacccctctccggccatgggcggattcggactcaaacacccaccgcccatgatgctcatcaagaacacgcctgtgcccggaaatatcaccagcttctcggacgtgcccgtcagcagcttcatcacccagtacagcaccgggcaggtcaccgtggagatggagtgggagctcaagaaggaaaactccaagaggtggaacccagagatccagtacacaaacaactacaacgacccccagtttgtggactttgccccggacagcaccggggaatacagaaccaccagacctatcggaacccgataccttacccgacccctttaacccattcatgtcgcataccctcaataaaccgtgtattcgtgtcagtaaaatactgcctc

SEQ ID NO: 3206 - protein, 736 aa, Artificial Sequence
  Synthetic polypeptide
MAADGYLPDWLEDNLSEGIREWWALKPGVPQPKANQQHQDNRRGLVLPGYKYLGPGNGLDKGEPVNEADAAALEHDKAYDQQLKAGDNPYLKYNHADAEFQERLQEDTSFGGNLGRAVFQAKKRILEPLGLVEEAAKTAPGKKRPVDQSPQEPDSSSGVGKSGKQPARKRLNFGQTGDSESVPDPQPLGEPPAAPTSLGSNTMASGGGAPMADNNEGADGVGNSSGNWHCDSQWLGDRVITTSTRTWALPTYNNHLYKQISSQSGASNDNHYFGYSTPWGYFDFNRFHCHFSPRDWQRLINNNWGFRPKKLSFKLFNIQVKEVTQNDGTTTIANNLTSTVQVFTDSEYQLPYVLGSAHQGCLPPFPADVFMVPQYGYLTLNNGSQAVGRSSFYCPEYFPSQMLRTGNNFQFSYTFEDVPFHSSYAHSQSLDRLMNPLIDQYLYYLNRTQGTTSGTTNQSRLLFSQAGPQSMSLQARNWLPGPCYRQQRLSKTANDNNNSNFPWTAASKYHLNGRDSLVNPGPAMASHKDDEEKFFPMHGNLIFGKEGTTASNAELDNVMITDEEEIRTTNPVATEQYGTVANNLQSSNTAPTTRTVNDQGALPGMVWQDRDVYLQGPIWAKIPHTDGHFHPSPLMGGFGLKHPPPQIMIKNTPVPANPPTTFSPAKFASFITQYSTGQVSVEIEWELQKENSKRWNPEIQYTSNYNKSVNVDFTVDTNGVYSEPHPIGTRYLTRNL

SEQ ID NO: 3207 - protein, 736 aa, Artificial Sequence
  Synthetic polypeptide
MAADGYLPDWLEDNLSEGIREWWALKPGVPQPKANQQHQDNRRGLVLPGYKYLGPGNGLDKGEPVNEADAAALEHDKAYDQQLKAGDNPYLKYNHADAEFQERLQEDTSFGGNLGRAVFQAKKRILEPLGLVEEAAKTAPGKKRPVDQSPQEPDSSSGVGKSGKQPARKRLNFGQTGDSESVPDPQPLGEPPAAPTSLGSNTMASGGGAPMADNNEGADGVGNSSGNWHCDSQWLGDRVITTSTRTWALPTYNNHLYKQISSQSGASNDNHYFGYSTPWGYFDFNRFHCHFSPRDWQRLINNNWGFRPKKLSFKLFNIQVKEVTQNDGTTTVANNLTSTVQVFTDSEYQLPYVLGSAHQGCLPPFPADVFMVPQYGYLTLNNGSQAVGRSSFYCLEYFPSQMLRTGNNFQFSYTFEDVPFHSSYAHSQSLDRLMNPLIDQYLYYLNRTQGTTSGTTNQSRLLFSQAGPQSMSLQARNWLPGPCYRQQRLSKTANDNNNSNFPWTAASKYHLNGRDSLVNPGPAMASHKDDEEKFFPMHGNLIFGKEGTTASNAELDNVMITDEEEIRTTNPVATEQYGTVANNLQSSNTAPTTRTVNDQGALPGMVWQDRDVYLQGPIWAKIPHTDGHFHPSPLMGGFGLKHPPPQIMIKNTPVPANPPTTFSPAKFASFITQYSTGQVSVEIEWELQKENSKRWNPEIQYTSNYNKSVNVDFTVDTNGVYSEPRPIGTRYLTRNL

SEQ ID NO: 3208 - protein, 736 aa, Artificial Sequence
  Synthetic polypeptide
MAADGYLPDWLEDNLSEGIREWWALKPGVPQPKANQQHQDNRRGLVLPGYKYLGPGNGLDKGEPVNEADAAALEHDKAYDQQLKAGDNPYLKYNHADAEFQERLQEDTSFGGNLGRAVFQAKKRILEPLGLVEEAAKTAPGKKRPVDQSPQEPDSSSGVGKSGKQPARKRLNFGQTGDSESVPDPQPLGEPPAAPTSLGSNTMASGGGAPMADNNEGADGVGNSSGNWHCDSQWLGDRVITTSTRTWALPTYNNHLYKQISGQSGASNDNHYFGYSTPWGYFDFNRFHCHFSPRDWQRLINNNWGFRPKKLSFKLFNIQVKEVTQNDGTTTIANNLTSTVQVFTDSEYQLPYVLGSAHQGCLPPFPADVFMVPQYGYLTLNNGSQAVGRSSFYCLEYFPSQMLRTGNNFQFSYTFEDVPFHSSYAHSQSLDRLMNPLIDQYLYYLNRTQGTTSGTTNQSRLLFSQAGPQSMSLQARNWLPGPCYRQQRLSKTANGNNNSNFPWTAASKYHLNGRDSLVNPGPAMASHKDDEEKFFPMHGNLIFGKEGTTASNAELDNVMITDEEEIRTTNPVATEQCGTVANNLQSSNTAPTTRTVNDQGALPGMVWQDRDVYLQGPIWAKIPHTDGHFHPSPLMGGFGLKHPPPQIMIKNTPVPANPPTTFSPAKFASFITQYSTGQVSVEIEWELQKENSKRWNPEIQYTSNYNKSVNVDFTVDTNGVYSEPRPIGTRYLTRNL

SEQ ID NO: 3209 - protein, 736 aa, Artificial Sequence
  Synthetic polypeptide
MAADGYLPDWLEDNLSEGIREWWALKPGVPQPKANQQHQDNRRGLVLPGYKYLGPGNGLDKGEPVNEADAAALEHDKAYDQQLKAGDNPYLKYNHADAEFQERLQEDTSFGGNLGRAVFQAKKRILEPLGLVEGAAKTAPGKKRPVDQSPQEPDSSSGVGKSGKQPARKRLNFGQTGDSESVPDPQPLGEPPAAPTSLGSNTMASGGGAPMADNNEGADGVGNSSGNWHCDSQWLGDRVITTSTRTWALPTYNSHLYKQISSQSGASNDNHYFGYSTPWGYFDFNRFHCHFSPRDWQRLINNNWGFRPKKLSFKLFNIQVKEVTQNDGTTTIANNLTSTVQVFTDSEYQLPYVLGSAHQGCLPPFPADAFMVPQYGYLTLNNGSQAVGRSSFYCLEYFPSQMLRTGNNFQFSYTFEDVPFHGSYAHSQSLDRLMNPLIDQYLYYLNRTQGTTSGTTNQSRLLFSQAGPQSMSLQARNWLPGPCYRQQRLSKTANDNNNSNFPWTAASKYHLNGRDSLVNPGPAMASHKDDEEKFFPMHGNLIFGKEGTTASNAELDNVMITDEEEIRTTNPVATEQYGTVANNLQSSNTAPTTRTVNDQGALPGMVWQDRDVYLQGPIWAKIPHTDGHFHPSPLMGGFGLKHPPPQIMIKNTPVPANPPTTFSPAKFASFITQYSTGQVSVEIEWELQKENSKRWNPEIQYTSNYNKSVNVDFTVDTNGVYSEPRPIGTRYLTRNS

SEQ ID NO: 3210 - protein, 736 aa, Artificial Sequence
  Synthetic polypeptide
MAADGYLPDWLEDNLSEGIREWWALKPGVPQPKANQQHQDNRRGLVLPGYKYLGPGNGLDKGEPVNEADAAALEHDKAYDQQLKAGDNPYLKYNHADAEFQERLQEDTSFGGNLGRAVFQAKKRILEPLGLVEGAAKTAPGKKRPVDQSPQEPDSSSGVGKSGKQLARKRLNFGQTGDSESVPDPQPLGEPPAAPTSLGSNTMASGGGAPMADNNEGADGVGNSSGNWHCDSQWLGDRVITTSTRTWALPTYNSHLYKQISGQSGASNDNHYFGYSTPWGYFDFNRFHCHFSPRDWQRLINNNWGFRPKKLSFKLFNIQVKEVTQNDGTTTIANNLTSTVQVFTDSEYQLPYVLGSAHQGCLPPFPADVFMVPQYGYLTLNNGSQAVGRSSFYCLEYFPSQMLRTGNNFQFSYTFEDVPFHSSYAHSQSLDRLMNPLIDQYLYYLNRTQGTTSGTTNQSRLLFSQAGPQSMSLQARNWLPGPCYRQQRLSKTANDNNNSNFPWTAASKYHLNGRDSLVNPGPAMASHKDDEEKFFPMHGNLIFGKEGTTASNAELDNVMITDEEEIRTTNPVATEQYGTVANNLQSSNTAPTTRTVNDQGALPGMVWQDRDVYLQGPIWAKIPHTDGHFHPSPLMGGFGLKHPPPQIMIKNTPVPANPPTTFSPAKFASFITQYSTGQVSVEIEWELQKENSKRWNPEIQYTSNYNKSVNVDFTVDTNGVYSEPRPIGTRYLTRNL

SEQ ID NO: 3211 - protein, 736 aa, Artificial Sequence
  Synthetic polypeptide
MAADGYLPDWLEDNLSEGIREWWALKPGVPQPKANQQHQDDRRGLVLPGYKYLGPGNGLDKGEPVNEADAAALEHDKAYDQQLKAGDNPCLKYNHADAEFQERLQEDTSFGGNLGRAVFQAKKRILEPLGLVEEAAKTAPGKKRPVDQSPQEPDSSSGVGKSGKQPARKRLNFGQTGDSESVPDPQPLGEPPAAPTSLGSNTMASGGSAPMADNNEGADGVGNSSGNWHCDSQWLGDRVITTSTRTWALPTYNNHLYKQISSQSGASNDNHYFGYSTPWGYFDFNRFHCHFSPRDWQRLINNNWGFRPKKLSFKLFNIQVKEVTQNDGTTTIANNLTSTVQVFTDSEYQLPYVLGSAHQGCLPPFPADVFMVPQYGYLTLNNGSQAVGRSSFYCLEYFPSQMLRTGNNFQFSYTFEDVPFHSSYAHSQSLDRLMDPLIDQYLYYLNRTQGTTSGTTNQSRLLFSQAGPQSMSLQARNWLPGPCYRQQRLSKTANDNNNSNFPWTAASKYHLNGRDSLVNPGPAMASHKDDEEKFFPMHGNLIFGKEGTTASNAELDNVMITDEEEIRTTNPVATEQYGTVANNLQSSNTAPTTRTVNDQGALPGMVWQDRDVYLQGPIWAKIPHTDGHFHPSPLMGGFGLKHPPPQIMIKNTPVPANPPTTFSPAKFASFITQYSTGQVSVEIEWELQKENSKRWNPEIQYTSNYNKSVNVDFTVDTNGVYSEPRPIGTRYLTRNL

SEQ ID NO: 3212 - protein, 736 aa, Artificial Sequence
  Synthetic polypeptide
MAADGYLPDWLEDNLSEGIREWWALKPGVPQPKANQQHQDDRRGLVLPGYKYLGPGNGLDKGEPVNEADAAALEHDKAYDQQLKAGDNPYLKYNHADAEFQERLQEDTSFGGNLGRAVFQAKKRILEPLGLVEEAAKTAPGKKRPVDQSPQEPDSSSGVGKSGKQPARKRLNFGQTGDSESVPDPQPLGEPPAAPTSLGSNTMASGGGAPMADNNEGADGVGNSSGNWHCDSQWLGNRVITTSTRTWALPTYNNHLYKQISSQSGASNDNHYFGYSTPWGYFDFNRFHCHFSPRDWQRLINNNWGFRPKKLSFKLFNIQVKEVTQNDGTTTIANNLTSTVQVFTDSEYQLPYVLGSAHQGCLPPFPADVFMVPQYGYLTLNNGSQAVGRSSFYCLEYFPSQMLRTGNNFQFSYTFEDVPFHSSYAHSQSLDRLMNPLIDQYLYYLNRTQGTTSGTTNQSRLLFSQAGPQSMSLQARNWLPGPCYRQQRLSKTANDNNNSNFPWTAASKYHLNGRDSLVNPGPAMASHKDDEEKFFPMHGNLIFGKEGTTASNAELDNVMITDEEEIRTTNPVATEQYGTVANNLQSSNTAPTTRTVNDQGALPGMVWQDRDVYLQGPIWAKIPHTDGHFHPSPLMGGFGLKHPPPQIMIKNTPVPANPPTTFSPAKFASFITQYSTGQVSVEIEWELQKENSKRWNPEIQYTSNYNKSVNVDFTVDTNGVYSEPRPIGTRYLTRNL

SEQ ID NO: 3213 - protein, 736 aa, Artificial Sequence
  Synthetic polypeptide
MAADGYLPDWLEDNLSEGIREWWALKPGVPQPKANQQHQDDRRGLVLPGYKYLGPGNGLDKGEPVNEADAAALEHDKAYDQQLKAGDNPYLKYNHADAEFQERLQEDTSFGGNLGRAVFQAKKRILEPLGLVEEAAKTAPGKKRPVDQSPQEPDSSSGVGKSGKQPARKRLNFGQTGDSESVPDPQPLGEPPAAPTSLGSNTMASGGGAPMADNNEGADGVGNSSGNWHCDSQWLGDRVITTSTRTWALPTYNNHLYKQISSQSGASNDNHYFGYSTPWGYFDFNRFHCHFSPRDWQRLINNNWGFRPKKLSFKLFNIQVKEVTQNDGTTTIANNLTSTVQVFTDSEYQLPYVLGSAHQGCLPPFPADVFMVPQYGYLTLNNGSQAVGRSSFYCLEYFPSQMLRTGNNFQFSYTFEDVPFHSSYAHSQSLDRLMNPLIDQYLYYLNRTQGTTSGTTNQSRLLFSQAGPQSMSLQARNWLPGPCYRQQRLSKTANDNNNSNFPWTAASKYHLNGRDSLVNPGPAMASHKDDEEKFFPMHGNLIFGKEGTTASNAELDNVMITDEEEIRTTNPVATVQYGTVANNLQSSNTAPTTRTVNDQGALPGMVWQDRDVYLQGPIWAKIPHTDGHFHPSPLMGGFGLKHPPPQIMIKNTPVPANPPTTFSPAKFASFITQYSTGQVSVEIEWELQKENSKRWNPEIQYTSNYNKSVNVDFTVDTNGVYSEPRPIGTRYLTRNL

SEQ ID NO: 3214 - protein, 735 aa, Artificial Sequence
  Synthetic polypeptide
MAADGYLPDWLEDNLSEGIREWWALKPGVPQPKANQQHQDNRRGLVLPGYKYLGPGNGLDKGEPVNEADAAALEHDKAYDQQLKAGDNPYLKYNHADAEFQERLQEDTSFGGNLGRAVFQAKKGILEPLGLVEEAAKTAPGKKRPVDQSPQEPDSSSGVGKSGKQPARKRLNFGQTGDSESVPDPQPLGEPPAAPTSLGSNTMASGGGAPMADNNEGADGVGNSSGNWHCDSQWLGDRVITTSTRTWALPTYNNHLYKQISSQSGASNDNHYFGYSTPWGYFDFNRFHCHFSPRDWQRLINNNWGFRPKKLSFKLFNIQVKEVTQNDGTTTIANNLTSTVQVFTDSEYQLPYVFGSAHQGCLPPFPADVFMVPQYGYLTLNNGSQAVGRSSFYCLEYFPSQMLRTGNNFQFSYTFEDVPFHSSYAHSQSSDRLMNPLIDQYLYYLNRTQGTTSGTTNQSRLLFSQAGPQSMSLQARNWLPGPCYRQQRLSKTANDNNNSNFPTAASKYHLNGRDSLVNPGPAMASHKDDEEKFFPMHGNLIFGKEGTTASNAELDNVMITDEEEIRTTNPVATEQYGTVANNLQSSNTAPTTRTVNDQGALPGMVWQDRDVYLQGPIWAKIPHTDGHFHPSPLMGGFGLKHPPPQIMIKNTPVPANPPTTFSPAKFASFITQYSTGQVSVEIEWELQKENSKRWNPEIQYTSNYNKSVNVDFTVDTNGVYSEPRPIGTRYLTRNL

SEQ ID NO: 3215 - protein, 736 aa, Artificial Sequence
  Synthetic polypeptide
MAADGYLPDWLEDNLSEGIREWWALKPGVPQPKANQQHQDNRRGLVLPGYKYLGPGNGLDEGEPVNEADAAALEHDKAYDQQLKAGDNPYLKYNHADAEFQERLQEDTSFGGNLGRAVFQAKKRILEPLGLVEGAAKTAPGKKRPVDQSPQEPDSSSGVGKSGKQPARKRLNFGQTGDSESVPDPQPLGEPPAAPTSLGSNTMASGGGAPMADNNEGADGVGNSSGNWHCDSQWLGDRVITTSTRTWALPTYNSHLYKQISSQSGASNDNHYFGYSTPWGYFDFNRFHCHFSPRDWQRLINNNWGFRPKKLSFKLFNIQVKEVTQNDGTTTIANNLTSTVQVFTDSEYQLPYVLGSAHQGCLPPFPADVFMVPQYGYLTLNNGSQAVGRSSFYCLEYFPSQMLRTGNNFQFSYTFEDVPFHSSYAHSQSLDRLMNPLIDQYLYYLNRTQGTTSGTTNQSRLLFSQAGPQSMSLQARNWLPGPCYRQQRLSKTANDNNNSNFPWTAASKYHLNGRDSLVNPGPAMASHKDDEEKFFPMHGNLIFGKEGTTASNAELDNVMITDEEEIRTTNPVATEQYGTVANNLQSSNTAPTTRTVNDQGALPGMVWQDRDVYLQGPIWAKIPHTDGHFHPSPLMGGFGLKHPPPQIMIKNTPVPANPPTTFSPAKFASFITQYSTGQVSVEIEWELQKENSKRWNPEIQYTSNYNKSVNVDFTVDTNGVYSEPRPIGTRYLTRNL

SEQ ID NO: 3216 - protein, 668 aa, Artificial Sequence
  Synthetic polypeptide
MAADGYLPDWLEDNLSEGIREWWALKPGVPQPKANQQHQDNRRGLVLPGYKYLGPGNGLDKGEPVNEADAAALEHDKAYDQQLKAGDNPYLKYNHADAEFQERLQEDTSFGGNLGRAVFQAKKRILEPLGLVEGAAKTAPGKKRPVDQSPQEPDSSSGVGKSGKQPARKRLNFGQTGDSESVPDPQPLGEPPAAPTSLGSNTMASGGGAPMADNNEGADGVGNSSGNWHCDSQWLGDRVITTSTRTWALPTYNSHLYKQISSQSGASNDNHYFGYSTPWGILTLTDSTATSHHVTGSDSLTTTGDSGPRNSASSSSTSKLKRSRRTMARRLLPITLPARFKCLRTRSISSRTCSGRRTKAVSRRFQRTPSWSLSMDTSPTTEVKRWDAHPFTAWSTSLRRCGLEITSNSAIPSRMYLFTAATLTARVWIAILLLISICTTTERKEQPLEQPTNHGCFLARLGLSLCLCRPEIGYLGPATGNRDFQRLLTTTTTVTFLGQRPANIISMAATRWIQDQLWPVTRTMKKNFSLCTAIRGPYLAWCGKIVTCTFKDLSGQRFLTRMDTFILLLWEALDNIRLLKSSKILRYRQILRRLSARPSLLHLSLSTPLDRSAWKLSGSYRKKTANVGIQRFSTLPTTTSLLMWTLLTLMVFIVNLALLEPGISHETC

SEQ ID NO: 3217 - protein, 734 aa, Artificial Sequence
  Synthetic polypeptide
MTDGYLPDWLEDNLSEGVREWWALQPGAPKPKANQQHQDNARGLVLPGYKYLGPGNGLDKGEPVNAADAAALEHDKAYDQQLKAGDNPYLKYNHADAEFQQRLQGDTSFGGNLGRAVFQAKKRVLEPLGLVEQAGETAPGKKRPLIESPQQPDSSTGIGKKGKQPAKKKLVFEDETGAGDGPPEGSTSGAMSDDSEMRAATGGAAVEGGQGADGVGNASGDWHCDSTWSEGHVTTTSTRTWVLPTYNNHLYKRLGESLQSNTYNGFSTPWGYFDFNRFHCHFSPRDWQRLINNNWGMRPKAMRVKIFNIQVKEVTTSNGETTVANNLTSTVQIFADSSYELPYVMDAGQEGSLPPFPNDVFMVPQYGYCGLVTGNTSQQQTDRNAFYCLEYFPSQMLRTGNNFEITYSFEKVPFHSMYAHSQSLDRLMNPLIDQYLWGLQSTTTGTTLNAGTATTNFTKLRPTNLSNFKKNWLPGPSIKQQGFSKTANQNYKIPATGSDSLIKYETHSTLDGRWSALTPGPPMATAGPADSKFSNSQLIFAGPKQNGNTATVPGTLIFTSEEELAATNATDTDMWGNLPGGDQSNSNLPTVDRLTALGAVPGMVWQNRDIYYQGPIWAKIPHTDGHFHPSPLIGGFGLKHPPPQIFIKNTPVPANPATTFSSTPVNSFITQYSTGQVSVQIDWEIQKERSKRWNPEVQFTSNYGQQNSLLWAPDAAGKYTEPRAIGTRYLTHHL

SEQ ID NO: 3218 - protein, 734 aa, Artificial Sequence
  Synthetic polypeptide
MTDGYLPDWLEDNLSEGVREWWALQPGAPKPKANQQHQDNARGLVLPGYKYLGPGNGLDKGEPVNAADAAALEHDKAYDQQLKAGDNPYLKYNHADAEFQQRLQGDTSFGGNLGRAVFQAKKRVLEPLGLVEQAGETAPGKKRPLIESPQQPDSSTGIGKKGKQPAKKKLVFEDETGAGDGPPEGSTSGAMSDDSEMRAAAGGAAVEGGQGADGVGNASGDWHCDSTWSEGHVTTTSTRTWVLPTYNNHLYKRLGESLQSNTYNGFSTPWGYFDFNRFHCHFLPRDWQRLINNNWGVRPKAMRVKIFNIQVKEVTTSNGETTVANNLTSTVQIFADSSYELPYVMDAGQEGSLPPFPNDVFMVPQYGYCGLVTGDTSQQQTDRNAFYCLEYFPSQMLRTGNNFEITYSFEKVPFHSMYAHSQSLDRLMNPLIDQYLWGLQSTTTGTTLNAGTATTNFTKLRPTNFSNFKKNWLPGPSIKQQGFSKTANQNYKIPATGSDSLIKYETHSTLDGRWSALTPGPPMATAGPADSKFSNSQLIFAGPKQNGNTATVPGTLIFTSEEELAATNATDTDMWGNLPGGDQSNSNLPTVDRLTALGAVPGMVWQNRDIYYQGPIWAKIPHTDGHFHPSPLIGGFGLKHPPPQIFIKNTPVPANPATTFSSTPVNSFITQYSTGQVSVQIDWEIQKERSKRWNPEVQFTSNYGQQNSLLWAPDAAGKYTEPRAIGTRYLTHHL

SEQ ID NO: 3219 - protein, 734 aa, Artificial Sequence
  Synthetic polypeptide
MTDGYLPDWLEDNLSEGVREWWALQPGAPKPKANQQHQDNARGLVLPGYKYLGPGNGLDEGEPVNAADAAALEHDKAYDQQLKAGDNPYLKYNHADAEFQQRLQGDTSFGGNLGRAVFQAKKRVLEPLGLVEQAGETAPGKKRPLIESPQQPDSSTGIGKKGKQPAKKKLVFEDETGAGDGPPEGSTSGAMSDDSEMRAAAGGAAVEGGQGADGVGNASGDWHCDSTWSEGHVTTTSTRTWVLPTYNNHLYKRLGESLQSNTYNGFSTPWGYFDFNRFHCHFSPRDWQRLINNNWGMRPKAMRVKIFNIQVKEVTTSNGETTVANNLTSTVQIFADSSYELPYVMDAGQEGSLPPFPNDVFMVPQYGYCGLVTGNTSQQQTDRNAFYCLEYFPSQMLRTGNNFEITYSFEKVPFHSMYAHSQSLDRLMNPLIDQYLWGLQSTTTGTTLNAGTATTNFTKLRPTNFSNFKKNWLPGPSIKQQGFSKTANQNYKIPATGSDSLIKYETHSTLDGRWSALTPGPPMATAGPADSKFSNSQLIFAGPKQNGNTATVPGTLIFTSEEELAATNATDTDMWGNLPGGDQSNSNLPTVDRLTALGAVPGMVWQNRDIYYQGPIWAKIPHTDGHFHPSPLIGGFGLKHPPPQIFIKNTPVPANPATTFSSTPVNSFITQYSTGQVSVQIDWEIQKERSKRWNPEVQFTSNYGQQNSLLWAPDAAGKYTEPRAIGTRYLTHHL

SEQ ID NO: 3220 - protein, 734 aa, Artificial Sequence
  Synthetic polypeptide
MTDGYLPDWLEDNLSEGVREWWALQPGAPKPKANQQHQDNARGLVLPGYKYLGPGNGLDKGEPVNAADAAALEHDKAYDQQLKAGDNPYLKYNHADAEFQQRLQGDTSFGGNLGRAVFQAKKRVLEPLGLVEQAGETAPGKKRPLIESPQQPDSSTGIGKKGKQPAKKKLVFEDGTGAGDGPPEGSTSGAMSDDSEMRAAAGGAAVEGGQGADGVGNASGDWHCDSTWSEGHVTTTSTRTWVLPTYNNHLYKRLGESLQSNTYNGFPTPWGYFDFNRFHCHFSPRDWQRLINNNWGMRPKAMRVKIFNIQVKEVTTSNGETTAANNLTSTVQIFADSSYELPYVMDAGQEGSLPPFPNDVFMVPQYGYCGLVTGNTSQQQTDRNAFYCLEYFPSQMLRTGNNFEITYSFEKVPFHSMYAHSQSLDRLMNPLIDQYLWGLQSTTTGTTLNAGTATTNFTKLRPTNFSNFKKNWLPGPSIKQQGFSKTANQNYKIPATGSDSLIKYETHSTLDGRWSALTPGPPMATAGPADSKFSNSQLIFAGPKQNGNTATVPGTLIFTSEEELAATNATDTDMWGNLPGGDQSNSNLPTVDRLTALGAVPGMVWQNRDIYYQGPIWAKIPHTDGHFHPSPLIGGFGLKHPPPQIFIKNTPVPANPATTFSSTPVNSFITQYSTGQVSVQIDWEIQKERSKRWNPEVQFTSNYGQQNSLLWAPDAAGKYTEPRAIGTRYLTHHL

SEQ ID NO: 3221 - protein, 734 aa, Artificial Sequence
  Synthetic polypeptide
MTDGYLPDWLEDNLSEGVREWWALQPGAPKPKANQQHQDNARGLVLPGYKYLGPGNGLDKGEPVNAADAAALEHDKAYDQQLKAGDNPYLKYNHADAEFQQRLQGDTSFGGNLGRAVFQAKKRVLEPLGLVEQAGETAPGKKRPLIESPQQPDSSTGIGKKGKQPAKKKLVFEDETGAGDGPPEGSTSGAMSDDSEMRAAAGGAAVEGGQGADGVGNASGDWHCDSTWSEGHVTTTSTRTWVLPTYNNHLYKRLGESLQSNTYNGFSTPWGYFDFNRFHCHFSPRDWQRLINNNWGMRPKAMRVKIFNIQVKEVTTSNGETTVANNLTSTVQIFADSSYELPYVMDAGQEGSLPPFPNDVFMVPQYGYRGLVTGNTSQQQTDRNAFYCLEYFPSQMLRTGNNFEITYSFEKVPFHSMYAHSQSLDRLMNPLIDQYLWGLQSTTTGTTLNAGTATTNFTKLRPTNFSNFKKNWLPGPSIKQQGFSKTANQNYKIPATGSDSLIKYETHSTLDGRWSALTPGPPMATAGPADSKFSNSQLIFAGPKQNGNTATVPGTLIFTSEEELAATNATDTDMWGNLPGGDQSNSNLPTVDRLTALGAVPGMVWQNRDIYYQGPIWAKIPHTDGHFHPSPLIGGFGLKHPPPQIFIKNTPVPANPATTFSSTPVNSFITQYSTGQVSVQIDWEIQKERSKRWNPEVQFTSNYGQQNSLLWAPDAAGKYTEPRAIGTRYLTHHL

SEQ ID NO: 3222 - protein, 734 aa, Artificial Sequence
  Synthetic polypeptide
MTDGYLPDWLEDNLSEGVREWWALQPGAPKPKANQQHQDNARGLVLQGYKYLGPGNGLDKGEPVNAADAAALEHDKAYDQQLKAGDNPYLKYNHADAEFQQRLQGDTSFGGNLGRAVFQAKKRVLEPLGLVEQAGETAPGKKRPLIESPQQPDSSTGIGKKGKQPAKKKLVFEDETGAGDGPPEGSTSGAMSDDSEMRAAAGGAAVEGGQGADGVGNASGDWHCDSTRSEGHVTTTSTRTWVLPTYNNHLYKRLGESLQSNTYNGFSTPWGYFDFNRFHCHFSPRDWQRLINNNWGMRPKAMRVKIFNIQVKEVTTSNGETTVANNLTSTVQIFADSSYELPYVMDAGQEGSLPPFPNDVFMVPQYGYCGLVTGNTSQQQTDRNAFYCLEYFPSQMLRTGNNFEITYSFEKVPFHSMYAHSQSLDRLMNPLIDQYLWGLQSTTTGTTLNAGTATTNFTKLRPTNFSNFKKNWLPGPSIKQQGFSKTANQNYKIPATGSDSLIKYETHSTLDGRWSARTPGPPMATAGPADSKFSNSQLIFAGPKQNGNTATVPGTLIFTSEEELAATNATDTDMWGNLPGGDQSNSNLPTVDRLTALGAVPGMVWQNRDIYYQGPIWAKIPHTDGHFHPSPLIGGFGLKHPPPQIFIKNTPVPANPATTFSSTPVNSFITQYSTGQVSVQIDWEIQKERSKRWNPEVQFTSNYGQQNSLLWAPDAAGKYTEPRAIGTRYLTHHL

SEQ ID NO: 3223 - protein, 724 aa, Artificial Sequence
  Synthetic polypeptide
MSFVDHPPDWLEEVGEGLREFLGLEAGPPKPKPNQQHQDQARGLVLPGYNYLGPGNGLDRGEPVNRADEVAREHDISYNEQLEAGDNPYLKYNHADAEFQERLADDTSFGGNLGKAVFQAKKRVLEPFGLVEEGAKTAPTGKRIDDHFPKRKKARTEEDSKPSTSSDAEAGPSGSQQLQIPAQPASSLGADTMSAGGGGPLGDNNQGADGVGNASGDWHCDSTWMGDRVVTKSTRTWVLPSYNNHQYREIKSGSVDGSNANAYFGYSTPWGYFDFNRFHSHWSPRDWQRLINNYWGFRPRSLRVKIFNIQVKEVTVQDSTTTIANNLTSTVQVFTDDDYQLPYVVGNGTEGCLPAFPPQVFTLPQYGYATLNRDNTENPTERSSFFCLEYFPSKMLRTGNNFEFTYNFEEVPFHSSFAPSQNLFKLANPLVDQYLYRFVSTNNTGGVQFNKNLAGRYANTYKNWFPGPMGRTQGWNLGSGVNRASVSAFATTNRMELEGASYQVPPQPNGMTNNLQGSNTYALENTMIFNSQPANPGTTATYLEGNMLITSESETQPVNRVAYNVGGQMATNNQSSTTAPATGTYNLQEIVPGSVWMERDVYLQGPIWAKIPETEAHFHPSPAMGGFGLKHPPPMMLIKNTPVPGNITSFSDVPVSSFITQYSTGQVTVEMEWELKKENSKRWNPEIQYTNNYNDPQFVDFAPDSTGEYRTTRPIGTRYLTRPL

SEQ ID NO: 3224 - protein, 724 aa, Artificial Sequence
  Synthetic polypeptide
MSFVDHPPDWLEEVGEGLREFLGLEAGPPKPKPNQQHQDQARGLVLPGYNYLGPGNGLDRGEPVNRADEVAREHDISYNEQLEAGDNPYLKYNHADAEFQEKLADDTSSGGNLGKAVFQAKKRVLEPFGLVEEGAKTAPTGKRIDDHFPKRKKARTEEDSKPSTSSDAEAGPSGSQQLQIPAQPASSLGADTMSAGGGGPLGDNNQGADGVGNASGDWHCDSTWMGDRVVTKSTRTWVLPSYNNHQYREIKSGSVDGSNANAYFGYSTPWGYFDFNRFHSHWSPRDWQRLINNYWGFRPRSLRVKIFNIQVKEVTVQDSTTTIANNLTSTVQVFTDDDYQLPYVVGNGTEGCLPAFPPQVFTLPQYGYATLNRDNTENPTERSSFFCLEYFPSKMLRTGNNFEFTYNFEEVPFHSSFAPSQNLFKLANPLVDQYLYRFVSTNNTGGVQFNKNLAGRYANTYKNWFPGPMGRTQGWNLGSGVNRASVSAFATTNRMELEGASYQVPPQPNGMTNNLQGSNTYALENTMIFNSQPANPGTTATYLEGNMLITSESETQPVNRVAYNVGGQMATNNQSSTTAPATGTYNLQEIVPGSVWMERDVYLQGPIWAKIPETGAHFHPSPAMGGFGLKHPPPMMLIKNTPVPGNITSFSDVPVSSFITQYSTGQVTVEMEWELKKENSKRWNPEIQYTNNYNDPQFVDFAPDSTGEYRTTRPIGTRYLTRPL

SEQ ID NO: 3225 - protein, 724 aa, Artificial Sequence
  Synthetic polypeptide
MSFVDHPPDWLEEVGEGLREFLGLEAGPPKPKPNQQHQDQARGLVLPGYNYLGPGNGLDRGEPVNRADEVAREHDISYNEQLEAGDNPYLKYNHADAEFQEKLADDTSFGGNLGKAVFQAKKRVLEPFGLVEEGAKTAPTGKRIDDHFPKRKKARTEEDSKPSTSSDAEAGPSGSQQLQIPAQPASSLGADTMSAGGGGPLGDNNQGADGVGNASGDWHCDSTWMGDRVVTKSTRTWVLPSYNNHQYREIKSGSVDGSNANAYFGYSTPWGYFDFNRFHSHWSPRDWQRLINNYWGFRPRSLRVKIFNIQVKEVTVQDSTTTIANNLTSTVQVFTDDDYQLPYVVGNGTEGCLPAFPPQVFTLPQYGYATLNRDNTENPTERSSFFCLEYFPSKMLRTGNNFEFTYNFEEVPFHSSFAPSQNLFKLANPLVDQYLYRFVSTNNTGGVQFNKNLAGRYANTYKNWFPGPMGRTQGWNLGSGVNRASVSAFATTNRMELEGASYQVPPQPNGMTNNLQGSNTYALENTMIFNSQPANPGTTATYLEGNMLITSESETQPVNRVAYNVGGQMATNNQSSTTAPATGTYNLQEIVPGSVWMERDVYLQGPIWAKIPETGAHFHPSPAMGGFGLKHPPPMMLIKSTPVPGNITSFSDVPVSSFITQYSTGQVTVEMEWELKKENSKRWNPEIQYTNNYNDPQFVDFAPDSTGEYRTTRPIGTRYLTRPL

SEQ ID NO: 3226 - protein, 724 aa, Artificial Sequence
  Synthetic polypeptide
MSFVDHPPDWLEEVGEGLREFLGPEAGPPKPKPNQQHQDQARGLVLPGYNYLGPGNGLDRGEPVNRADEVAREHDISYNEQLEAGDNPYLKYNHADAEFQEKLADDTSFGGNLGKAVFQAKKRVLEPFGLVEEGAKTAPTGKRIDDHFPKRKKVRTEEDSKPSTSSDAEAGPSGSQQLQIPAQPASSLGADTMSAGGGGPLGDNNQGADGVGNASGDWHCDSTWMGDRVVTKSTRTWVPPSYNNHQYREIKSGSVDGSNANAYFGYSTPWGYFDFNRFHSHWSPRDWQRLINNYWGFRPRSLRVKIFNIQVKEVTVQDSTTTIANNLTSTVQVFTDDDYQLPYVVGNGTEGCLPAFPPQVFTLPQYGYATLNRDNTENPTERSSFFCLEYFPSKMLRTGNNFEFTYNFEEVPFHSSFAPSQNLFKLANPLVDQYLYRFVSTNNTGGVQFNKNLAGRYANTYKNWFPGPMGRTQGWNLGSGVNRASVSAFATTNRMELEGASYQVPPQPNGMTNNLQGSNTYALENTMIFNSQPANPGTTATYLEGNMLITSESETQPVNRVACNVGGQMATNNQSSTTAPATGTYNLQEIVPGSVWMERDVYLQGPIWAKIPETGAHFHPSPAMGGFGLKHPPPMMLIKNTPVPGNITSFSDVPVSSFITQYSTGQVTVEMEWELKKENSKRWNPEIQYTNNYNDPQFVDFAPDSTGEYRTTRPIGTRYLTRPL

SEQ ID NO: 3227 - protein, 724 aa, Artificial Sequence
  Synthetic polypeptide
MSFVDHPPDWLEEVGEGLREFLGLEAGPPKPKPNQQHQDQARGLVLPGYNYLGPGNGLDRGEPVNRADEVAREHDISYNEQLEAGDNPYLKYNHADAEFQEKLADDTSFGGNLGKAVFQAKKRVLEPFGLVEEGAKTAPTGKRIDDHFPKRKKARTEEDSKPSTSSDAEAGPSGSQQLQIPAQPASSLGADTMSAGGGGPLGDNNQGADGVGNASGDWHCDSTWMGDRVVTKSTRTWVLPSYNNHQYREIKSGSVDGSNANAYFGYSTPWGYFDFNRFHSHWSPRDWQRLINNYWGFRPRSLRVKIFNIQVKEVTVQDSTTTIANNLTSTVQVFTDDDYQLPYVVGNGTEGCLPAFPPQVFTLPQYGYATLNRDNTENPTERSSFFCLEYFPSKMLRTGNNFEFTYNFEEVPFHSSFAPSQNLFKLANPLVDQYLYRFVSTNNTGGVQFNKNLAGRYANTYKNWFPGPMGRTQGWNLGSGVNRASVSAFATTNRMELEGASYQVPPQPNGMTNNLQGSNTYALENTMIFNSQPANPGTTATYLEGNMLITSESETQPVNRVAYNVGGQMATNNQSSTTAPATGAYNLQEIVPGSVWMERDVYLQGPIWAKIPETGAHFHPSPAMGGFGLKHPPPMMLIKNTPVPGNITSFSDVPVSSFITQYSTGQVTVEMEWELKKENSKRWNPEIQYTNNYNDPQFVDFAPDSTGEYRTTRPIGTRYLTRPL

SEQ ID NO: 3228 - protein, 724 aa, Artificial Sequence
  Synthetic polypeptide
MSFVDHPPDWLEEVGEGLREFLGLEAGPPKPKPNQQHQDQARGLVLPGYNYLGPGNGLDRGEPVNRADGVAREHDISYNEQLEAGDNPYLKYNHADAEFQEKLADDTSFGGNLGKAVFQAKKRVLEPFGLVEEGAKTAPTGKRIDDHFPKRKKARTEEDSKPSTSSDAEAGPSGSQQLQIPAQPASSLGADTMSAGGGGPLGDNNQGADGVGNASGDWHCDSTWMGDRVVTKSTRTWVLPSYNNHQYREIKSGSVDGSNANAYFGYSTPWGYFDFNRFHSHWSPRDWQRLINNYWGFRPRSLRVKIFNIQVKEVTVQDSTTTIANNLTSTVQAFTDDDYQLPYVVGNGTEGCLPAFPPQVFTLPQYGYATLNRDNTENPTERSSFFCLEYFPSKMLRTGNNFEFTYNFEEVPFHSSFAPSQNLFKLANPLVDQYLYRFVSTNNTGGVQFNKNLAGRYANTYKNWFPGPMGRTQGWNLGSGVNRASVSAFATTNRMELEGASYQVPPQPNGMTNNLQGSNTYALENTMIFNSQPANPGTTATYLEGNMLITSESETQPVNRVAYNVGGQMATNNQSSTTAPATGTYNLQEIVPGSVWMERDVYLQGPIWAKIPETGAHFHPSPAMGGFGLKHPPPMMLIKNTPVPGNITSFSDVPVSSFITQYSTGQVTVEMEWELKKENSKRWNPEIQYTNNYNDPQFVDFAPDSTGEYRTTRPIGTRYLTRPL

SEQ ID NO: 3229 - protein, 723 aa, Artificial Sequence
  Synthetic polypeptide
MSFVDHPPDWLEEVGEGLREFLGLEAGPPKPKPNQQHQDQARGLVLPGYNYLGPGNGLDRGEPVNRADEVAREHDISYNEQLEAGDNPYLKYNHADAEFQEKLADDTSFGGNLGKAVFQAKKRVLEPFGLVEEGAKTAPTGKRIDDHFPKRKKARTEEDSKPSTSSDAEAGPSGSQQLQIPAQPASSLGADTMSAGGGGPLGDNNQGADGVGNASGDWHCDSTWMGDRVVTKSTRTWVLPSYNNHQYREIKSGSVDGSNANAYFGYSTPWGYFDFNRFHSHWSPRDWQRLINNYWGFRPRSLRVKIFNIQVKEVTVQDSTTTIANNLTSTVQVFTDDDYQLPYVVGNGTEGCLPAFPPQVFTLPQYGYATLNRDNTENPTERSSFFCLEYFPSKMLRTGNNFEFTYNFEEVPFHSSFAPSQNLFKLANPLVDQYLYRFVSTNNTGGVQFNKNLAGRYANTYKNWFPGPMGRTQGWNLGSGVNRASVSAFATTNRMELEGASYVPPQPNGMTNNLQGSNTYALENTMIFNSQPANPGTTATYLEGNMLITSESETQPVNRVAYNVGGQMATNNQSSTTAPATGTYNLQEIVPGSVWMEGDVYLQGPIWAKIPETGAHFHPSPAMGGFGLKHPPPMMLIKNTPVPGNITSFSDVPVSSFITQYSTGQVTVEMEWELKKENSKRWNPEIQYTNNYNDPQFVDFAPDSTGEYRTTRPIGTRYLTRPL

SEQ ID NO: 3230 - protein, 724 aa, Artificial Sequence
  Synthetic polypeptide
MSFVDHPPDWLEEVGEGLREFLGLEAGPPKPKPNQQHQDQARGLVLPGYNYLGPGNGLDRGEPVNRADEVAREHDISYNEQLEAGDNPYLKYNHADAEFQEKLADDTSFGGNLGKAVFQAKKRVLEPFGLVEEGAKTAPTGKRIDDHFPKRKKVRTEEDSKPSTSSDAEAGPSGSQQLQIPAQPASSLGADTMSAGGGGPLGDNNQGADGVGNASGDWHCDSTWMGDRVVTKSTRTWVLPSYNNHQYREIKSGSVDGSNANAYFGYSTPWGYFDFNRFHSHWSPRDWQRLINNYWGFRPRSLRVKIFNIQVKEVTVQDSTTTIANNLTSTVQVFTDDDYQLPYVVGNGTEGCLPAFPPQVFTLPQYGYATLNRDNTENPTERSSFFCLEYFPSKMLRTGNNFEFTYNFEEVPFHSSFAPSQNLFKLANPLVDQYLYRFVSTNNTGGVQFNKNLAGRYANTYKNWFPGPMGRTQGWNLGSGVNRASVSAFATTNRMELEGASYQVPPQPNGMTNNLQGSNTYALENTMIFNSQPANPGTTATYLEGNMLITSESETQPVNRVAYNVGGQMATNNQSSTTAPATGTYNLQEIVPGSVWMERDVYLQGPIWAKIPETGAHFHPSPAMGGFGLKHPPPMMLIKNTPVPGNITSFSDVPVSSFITQYSTGQVTVEMEWELKKENSERWNPEIQYTNNYNDPQFVDFAPDSTGEYRTTRPIGTRYLTRPL

SEQ ID NO: 3231 - protein, 724 aa, Artificial Sequence
  Synthetic polypeptide
MSFVDHPPDWLEEVGEGLREFLGLEAGPPKPKPNQQHQDQARGLVLPGYNYLGPGNGLDRGEPVNRADEVAREHDISYSEQLEAGDNPYLKYNHADAEFQEKLADDTSFGGNLGKAVFQAKKRVLEPFGLVEEGAKTAPTGKRIDDHFPKRKKARTEEDSKPSTSSDAEAGPSGSQQLQIPAQPASSLGADTMSAGGGGPLGDNNQGADGVGNASGDWHCDSTWMGDRVVTKSTRTWVLPSYNNHQYREIKSGSVDGSNANAYFGYSTPWGYFDFNRFHSHWSPRDWQRLINNYWGFRPRSLRVKIFNIQVKEVTVQDSTTTIANNLTSTVQVFTDDDYQLPYVVGNGTEGCLPAFPPQVFTLPQYGYATLNRDNTENPTERSSFFCLEYFPSKMLRTGNNFEFTYNFEEVPFHSSFAPSQNLFKLANPLVDQYLYRFVSTNNTGGVQFNKNLAGRYANTYKNWFPGPMGRTQGWNLGSGVNRASVSAFATTNRMELEGASYQVPPQPNGMTNNLQGSNTYALENTMIFNSQPANPGTTATYLEGNMLITSESETQPVNRVAYNVGGQMATNNQSSTTAPATGTYNLQEIVPGSVWMERDVYLQGPIWAKIPETGAHFHPSPAMGGFGLKHPPPMMLIKNTPVPGNITSFSDVPVSSFITQYSTGQVTVEMEWELKKENSKRWNPEIQYTNNYNDPQFVDFAPDSTGEYRTARPIGTRYLTRPL

SEQ ID NO: 3232 - protein, 724 aa, Artificial Sequence
  Synthetic polypeptide
MSFVDHPPDWLEEVGEGLREFLGPEAGPPKPKPNQQHQDQARGLVLPGYNYLGPGNGLDRGEPVNRADEVAREHDISYNEQLEAGDNPYLKYNHADAEFQEKLADDTSFGGNLGKAVFQAKKRVLEPFGLVEEGAKTAPTGKRIDDHFPKRKKARTEEDSKPSTSSDAEAGPSGSQQLQIPAQPASSLGADTMSAGGGGPLGDNNQGADGVGNASGDWHCDSTWMGDRVVTKSTRTWVLPSYNNHQYREIKSGSVDGSNANAYFGYSTPWGYFDFNRFHSHWSPRDWQRLINNYWGFRPRSLRVKIFNIQVKEVTVQDSTTTIANNLTSTVQVFTDDDYQLPYVVGNGTEGCLPAFPPQVFTLPQYGYATLNRDNTENPTERSSFFCLEYFPSKMLRTGNNFEFTYNFEEVPFHSSFAPSQNLFKLANPLVDQYLYRFVSTNNTGGVQFNKNLAGRYANTYKNWFPGPMGRTQGWNLGSGVNRASVSAFATTNRMELEGASYQVPPQPNGMTNNLQGSNTYALENTMIFNSQPANPGTTATYLEGNMLITSESETQPVNRVAYNVGGQMTTNNQSSTTAPATGTYNLQEIVPGSVWMERDVYPQGPIWAKIPETGAHFHPSPAMGGFGLKHPPPMMLIKNTPVPGNITSFSDVPVSSFITQYSTGQVTVEMEWELKKENSKRWNPEIQYTNNYNDPQFVDFAPDSTGEYRTTRPIGTRYLTRPL

SEQ ID NO: 3233 - protein, 724 aa, Artificial Sequence
  Synthetic polypeptide
MSFVDHPPDWLEEVGEGLREFLGLEAGPPKPKPNQQHQDQARGLVLPGYNYLGPGNGLDRGEPVNRADEVAREHDISYNEQLEAGDNPYLKYNHADAEFQEKLADDTSFGGNLGKAVFQAKKRVLEPFGLVEEGAKTAPTGKRIDDHFPKRKKARTEEDSKPSTSSDAEAGPSGSQQLQIPAQPASSLGADTMSAGGGGPLGDNNQGADGVGNASGDWHCDSTWMGDRVVTKSTRTWVLPSYNNHQYREIKSGSVDGSNANAYFGYSTPWGYFDFNRFHSHWSPRDWQRLINNYWGFRPRSLRVKIFNIQVKEVTVQDSTTTIANNLTSTVQVFTDDDYQLPYVVGNGTEGCLPAFPPQVFTLPQYGYATLNRDNTENPTERSSFLCLEYFPSKMLRTGNNFEFTYNFEEVPFHSSFAPSQNLFKLANPLVDQYLYRFVSTNNTGGVQFNKNLAGRYANTYKNWFPGPMGRTQGWNLGSGVNRASVSAFATTNRMELEGASYQVPPQPNGMTNNLQGSNTYALENTMIFNSQPANPGTTATYLEGNMLITSESETQPVNRVAYNVGGQMATNNQSSTTAPATGTYNLQEIVPGSVWMKRDVYLQGPIWAKIPETGAHFHPSPAMGGFGLKHPPPMMLIKNTPVPGNITSFSDVPVSSFITQYSTGQVTVEMEWELKKENSKRWNPEIQYTNNYNDPQFVDFAPDSTGEYRTTRPIGTRYLTRPL

SEQ ID NO: 3234 - protein, 724 aa, Artificial Sequence
  Synthetic polypeptide
MSFVDHPPDWLEEVGEGLREFLGLEAGPPKPKPNQQHQDQARGLVLPGYNYLGPGNGLDRGEPVNRADEVAREHDISYNEQLEAGDNPYLKYNHADAEFQEKLADDTSFGGNLGKAVFQAKKRVLEPFGLVEEGAKTAPTGKRIDDHFPKRKKARTEEDSKPSTPSDAEAGPSGSQQLQIPAQPASSLGADTMSAGGGGPLGDNNQGADGVGNASGDWHCDSTWMGDRVVTKSTRTWVLPSYNNHQYREIKSGSVDGSNANAYFGYSTPWGYFDFNRFHSHWSPRDWQRLINNYWGFRPRSLRVKIFNIQVKEVTVQDSTTTIANNLTSTVQVFTDDDYQLPYVVGNGTEGCLPAFPPQVFTLPQYGYATLNRDNTENPTERSSFFCLEYFPSKMLRTGNNFEFTYNFEEVPFHSSFAPSQNLFKLANPLVDQYLYRFVSTNNTGGVQFNKNLAGRYANTYKNWFPGPMGRTQGWNLGSGVNRASVSAFATTNRMELEGASYQVPPQPNGMTNNLQGSNTYALENTMIFNSQPANPGTTATYLEGNMLITSESETQPVNRVAYNVGGQMATNNQSSTTAPATGTYNLQEIVPGSVWMERDVYLQGPIWAKIPETGAHFHPSPAMGGFGLKHPPPMMLIKNTPVPGNITSFSDVPVSSFITQYSTGQVTVEMEWELKKENSKRWNPEIQYTNNYNDPQFVDFAPDSTGEYRTTRPIGTRYLTRPL

SEQ ID NO: 3235 - protein, 724 aa, Artificial Sequence
  Synthetic polypeptide
MSFVDHPPDWLEEVGEGLREFLGLEAGPPKPKPNQQHQDQARGLVLPGYNYLGPGNGLDRGEPVNRADEVAREHDISYNEQLEAGDNPYLKYNHADAEFQEKLADDTSFGGNLGKAVFQAKKRVLEPFGLVEEGAKTAPTGKRIDDHFPKRKKARTEEDSKPSTSSDAEAGPSGSQQLQIPAQPASSLGADTMSAGGGGPLGDNNQGADGVGNASGDWHCDSTWMGDRVVTKSTRTWVLPSYNNHQYREIKSGSVDGSNANAYFGYSTPWGYFDFNRFHSHWSPRDWQRLINNYWGFRPRSLRVKIFNIQVKEVTVQDSTTTIANNLTSTVQVFTDDDYQLPYVVGNGTEGCLPAFPPQVFTLPQYGYATLNRDNTENPTERSSFFCLEYFPSKMLRTGNNFEFTYNFEEVPFHSSFAPSQNLFKLANPLVDQYLYRFVSTNNTGGVQFNKNLAGRYANTHKNWFPGPMGRTQGWNLGSGVNRASVSAFATTNRMELEGASYQVPPQSNGMTNNLRGSNTYALENTMIFNSQPANPGTTATYLEGNMLITSESETQPVNRVAYNVGGQMATNNQSSTTAPATGTYNLQEIVPGSVWMERDVYLQGPIWAKIPETGAHFHPSPAMGGFGLKHPPPMMLIKNTPVPGNITSFSDVPVSSFITQYSTGQVTVEMEWELKKENSKRWNPEIQYTNNYNDPQFVDFAPDSTGEYRTTRPIGTRYLTRPL

SEQ ID NO: 3236 - protein, 724 aa, Artificial Sequence
  Synthetic polypeptide
MSFVDHPPDWLEEVGEGLREFLGLEAGPPKPKPNQQHQDQARGLVLPGYNYLGPGNGLDRGEPVNRADEVAREHDISYNEQLEAGDNPYLKYNHADAEFQEKLADDTSFGGNLGKAVFQAKKRVLEPFGLVEEGAKTAPTGKRIDDHFPKRKKARTEEDSKPSTSSDAEAGPSGSQQLQIPAQPASSLGADTMSAGGGGPLGDNNQGADGVGNASGDWHCDSTWMGDRVVTKSTRTWVLPSYNNHQYREIKSGSVDGSNANAYFGYSTPWGYFDFNRFHSHWSPRDWQRLINNYWGFRPRSLRVKIFNIQVKEVTVQDSTTTIANNLTSTVQVFTDDDYQLPYVVGNGTEGCLPAFPPQVFTLPQYGYATLNRDNTENPTERSSFFCLEYFPSKMLRTGNNFEFTYNFEEVPFHSSFAPSQNLFKLANPLVDQYLYRFVSTNNTGGVQFNKNLAGRYANTYKNWFPGPMGRTQGWNLGSGVNRASVSAFATTNRMELEGASYQVPPQPNGMTNNLQGSNTYALENTMIFNSQPANPGTTATYLEGNMLITSESETQPVNRVAYSVGGQMATNNQSSTTAPTTGTYNLQEIVPGSVWMERDVYLQGPIWAKIPETGAHFHPSPAMGGFRLKHPPPMMLIKNTPVPGNITSFSDVPVSSFITQYSTGQVTVEMEWELKKENSKRWNPEIQYTNNYNDPQFVDFAPDSTGEYRTTRPIGTRYLTRPL

SEQ ID NO: 3237 - protein, 724 aa, Artificial Sequence
  Synthetic polypeptide
MSFVDHPPDWLEEVGEGLREFLGLEAGPPKPKPNQQHQDQARGLVLPGYNYLGPGNGLDRGEPVNRADEVAREHDISYNEQLEAGDNPYLKYNHADAEFQEKLADDTSFGGNLGKAVFQAKKRVLEPFGLVEEGAKTAPTGKRIDDHFPKRKKARTEEDSKPSTSSDAEAGPSGSQQLQIPAQPASSLGADTMSAGGGGPLGDNNQGADGVGNASGDWHCDSTWMGDRVVTKSTRTWVLPSYNNHQYREIKSGSVDGSNANAYFGYSTPWGYFDFNRFHSHWSPRDWQRLINNYWGFRPRSLRVKIFNIQVKEVTVQDSTTTIANNLTSTVQVFTDDDYQLPYVVGNGTEGCLPAFPPQVFTLPQYGYATLNRDNTENPTERSSFFCLEYFPSKMLRTGNNFEFTYNFEEVPFHSSFAPSQNLFKLANPLVDQYLYRFVSTNNTGGVQFNKNLAGRYANTYKNWFPGPMGRTQGWNLGSGVNRASVSAFAATNRMELEGASYQVPPQPNGMTNNLQGSNTYALENTMIFNSQPANPGTTATYLEGNMLITSESETQPVNRVAYNVGGQMATNNQSSTTAPATGTYNLQEIVPGGVWMERDVYLQGPIWAKIPETGAHFHPSPAMGGFGLKHPPPMMLIKNTPVPGNTTSFSDVPVSSFITQYSTGQVTVEMEWELKKENSKRWNPEIQYTNNYNDPQFVDFAPDSTGEYRTTRPIGTRYLTRPL

SEQ ID NO: 3238 - protein, 724 aa, Artificial Sequence
  Synthetic polypeptide
MSFVDHPPDWLEEVGEGLREFLGLEAGPPKPKPNQQHQDQARGLVLPGYNYLGPGNGLDRGEPVNRADEVAREHDISYNEQLEAGDNPYLKYNHADAEFQEKLADDTSFGGNLGKVVFQAKKRVLEPFGLVEEGAKTAPTGKRIDDHFPKRKKARTEEDSKPSTSSDAEAGPSGSQQLQIPAQPASSLGADTMSAGGGGPLGGNNQGADGVGNASGDWHCDSTWMGDRVVTKSTRTWVLPSYNNHQYREIKSGSVDGSNANAYFGYSTPWGYFDFNRFHSHWGPRDWQRLINNYWGFRPRSLRVKIFNIQVKEVTVQDSTTTIANNLTSTVQVFTDDDYQLPYVVGNGTEGCLPAFPPQVFTLPQYGYATLNRDNTENPTERSSFFCLEYFPSKMLRTGNNFEFTYNFEEVPFHSSFAPSQNLFKLANPLVDQYLYRFVSTNNTGGVQFNKNLAGRYANTYKNWFPGPMGRTQGWNLGSGVNRASVSALATTNRMELEGASYQVPPQPNGMTNNLQGSNTYALENTMIFNSQPANPGTTATYLEGNMLITSESETQPVNRVAYNVGGQMATNNQSSTTAPATGTYNLQEIVPGSVWMERDVYLQGPIWAKIPETGAHFHPSPAMGGFGLKHPPPMMLIKNTPVPGNITSFSDVPVSSFITQYSTGQVTVEMEWELKKENSKRWNPEIQYTNNYNDPQFVDFAPDSTGEYRTTRPIGTRYLTRPL

SEQ ID NO: 3239 - protein, 723 aa, Artificial Sequence
  Synthetic polypeptide
MSFVDHPPDWLEEVGEGLREFLGLEAGPPKPKPNQQHQDQARGLVLPGYNYLGPGNGLDRGEPVNRADEVAREHDISYNEQLEAGDNPYLKYNHADAEFQEKLADDTSFGGNLGKAVFQAKKRVLEPFGLVEEGAKTAPTGKRIDDHFPKRKKARTEEDSKPSTSSDAEAGPSGSQQLQIPAQPASSLGADTMSAGGGGPLGDNNQGADGVGNASGDWHCDSTWMGDRVVTKSTRTWVLPSYNNHQYREIKSGSVDGSNANAYFGYSTPWGYFDFNRFHSHWSPRDWQRLINNYWGFRPRSLRVKIFNIQVKEVTVQDSTTTIANNLTSTVQVFTDDDYQLPYVVGNGTEGCLPAFPPQVFTLPQYGYATLNRDNTENPTERSSFFCLEYFPSKMLRTGNNFEFTYNFEEVPFHSSFAPSQNLFKLANPLVDQYLYRFVSTNNTGGVQFNKNLAGRYANTYKNWFPGPMGRTQGWNLGSGVNRASVSAFATTNRMELEGASYQVPPQPNGMTNNLQGSNTYALENTMIFNSQPANPGTTATYLEGNMLITSESETQPVNRVAYNVGGQMATNNQSSTTAPATGTYNLQEIVPGSVWMERDVYLQGPIAKIPETGAHFHPSPAMGGFGLKHPPPMMLIKNTPVPGNITSFSDVPVSSFITQYSTGQVTVEMEWELKKENSKRWNPEIQYTNNYNDPQFVDFAPDSTGECRTTRPIGTRYLTRPL

SEQ ID NO: 3240 - protein, 724 aa, Artificial Sequence
  Synthetic polypeptide
MSFVDHPPDWLEEVGEGLREFLGLEAGPPKPKPNQQHQDQARGLVLPGYNYLGPGNGLDRGEPVNRADEVAREHDISYNEQLEAGDNPYLKYNHADAEFQEKLADDTSFGGNLGKAVFQAKKRVLEPFGLVEEGAKTAPTGKRIDDHFPKRKKARTEEDSKPSTSSDAEAGPSGSQQLQIPAQPASSLGADTMSAGGGGPLGDNNQGADGVGNASGDWHCDSTWMGDRVVTKSTRTWVLPSYNNHQYREIKSGSVDGSNANAYFGYSTPWGYFDFNRFHSHWSPRDWQRLINNYWGFRPRSLRVKILNIQVKEVTVQDSTTTIANNLTSTVQVFTDDDYQLPYVVGNGTEGCLPAFPPQVFTLPQYGYATLNRDNTENPTERSSFFCLEYFPSKMLRTGNNFEFTYNFEEVPFHSSFAPSQNLFKLANPLVGQYLYRFVSTNNTGGVQFNENLAGRYANTYKNWFPGPMGRTQGWNLGSGVNRASVSAFATTNRMELEGASYQVPPQPNGMTNNLQGSNTYALENTMIFNSQPANPGTTATYLEGNMLITSESETQPVNRVAYNVGGQMATNNQSSTTAPATGTYNLQEIVPGSVWMERDVYLQGPIWAKIPETGAHFHPSPAMGGFGLKHPPPMMLIKNTPVPGNITSFSDVPVSSFITQYSTGQATVEMEWELKKENSKRWNPEIQYTNNYNDPQFVDFAPDSTGEYRTTRPIGTRYLTRPL

SEQ ID NO: 3241 - protein, 724 aa, Artificial Sequence
  Synthetic polypeptide
MSFVDHPPDWLEEVGEGLREFLGLEAGPPKPKPNQQHQDQARGLVLPGYNYLGPGNGLDRGEPVNRADEVAREHDISYNEQLEAGDNPYLKYNHADAEFQEKLADDTSFGGNLGKAVFQAKKRVLEPFGLVEEGAKTAPTGKRIDDHFPKRKKARTEEDSKPSTSSDAEAGPSGSQQLQIPAQPASSLGADTMSAGGGGPLGDNNQGADGVGNASGDWHCDSTWMGDRVVTKSTRTWVLPSYNNHQYREIKSGSVDGSNANAYFGYSTPWGYFDFNRFHSHWSPRDWQRLINNYWGFRPRSLRVKIFNIQVKEVTVQDSTTIIANNLTSTVQVFTDDDYQLPYVVGNGTEGCLPAFPPQVFTLPQYGYATLNRDNTENPTERSSFFCLEYFPSKMLRTGNNFEFTYNFEEVPFHSSFAPSQNLFKLANPLVDQYLYRFVSTNNTGGVQFNKNLAGRYANTYKNWFPGPMGRTQGWNLGSGVNRASVSAFATTNRMELEGASYQVPPQPNGMTNNLQGSNTYALENTMIFNSQPANPGTTATYLEGNMLITSESETQPVNRVAYNVGGQMATNNQSSTTAPATGTYNLQEIVPGSVWMERDVYLQGPIWAKIPETGAHFHPSPAMGGFGLKHPPPMMLIKNTPVPGNITSFSDVPVSSFITQYSTGQVTVEMEWELKKENSKRWNPEIQYTNNYNDPQFVDFAPDSTGEYRTTRPIGTRYLTRPL

SEQ ID NO: 3242 - protein, 724 aa, Artificial Sequence
  Synthetic polypeptide
MSFVDHPPDWLEEVGEGLREFLGLEAGPPKPKPNQQHQDQARGLVLPGYNYLGPGNGLDRGEPVNRADEVAREHDISYNEQLEAGDNPYLKYNHADAEFQEKLADDTSFGGNLGKAVFQAKKRVLEPFGLVEEGAKTAPTGKRIDDHFPKRKKARTEEDSKPSTSSDAEAGPSGSQQLQIPAQPASSLGADTMSAGGGGPLGDNNQGADGVGNASGDWHCDSTWMGDRVVTKSTRTWVLPSYNNHQYREIKSGSVDGSNANAYFGYSTPWGYFDFNRFHSHWSPRDWQRLINNYWGFRPRSLRVKIFNIQVKEVTVQDSTTTIANNLTSTVQVFTDDDYQLPYVVGNGTEGCLPAFPPQVFTLPQYGYATLNRDNTENPTERSSFFCLEYFPSKMLRTGNNFEFTYNFEEVPFHSSFAPSQNLFKLANPLVDQYLYRFVSTNNTGGVQFNKNLAGRYANTYKNWFPGPMGRTQGWNLGSGVNRASVSAFATTNRMELEGASYQVPPQPNGMTNNLQGSNTYALENTMIFNSQPANPGTTATYLEGNMLITSESETQPVNRVAYNVGGQMATNNQSSTTAPATGTYNLQEIVPGSVWMERDVYLQGPIWAKIPETGAHFHPSPAMGGFGLKHPPPMMLIKNTPVPGNITSLSDVPVSSFITQYSTGQVTVEMEWELKKENSKRWNPEIQYTNNYNDPQFVDFAPDSTGEYRTTRPIGTRYLTRPL

SEQ ID NO: 3243 - protein, 724 aa, Artificial Sequence
  Synthetic polypeptide
MSFVDHPPDWLEEVGEGLREFLGLEAGPPKPKPNQQHQDQARGLVLPGYNYLGPGNGLDRGEPANRADEVAREHDISYNEQLEAGDNPYLKYNHAGAEFQEKLADDTSFGGNLGKAVFQAKKRVLEPFGLVEEGAKTAPTGKRIDDHFPKRKKARTEEDSKPSTSSDAEAGPSGSQQLQIPAQPASSLGADTMSAGGGGPLGDNNQGADGVGNASGDWHCDSTWMGDRVVTKSTRTWVLPGYNNHQYREIKSGSVDGSNANAYFGYSTPWGYFDFNRFHSHWSPRDWQRLINNYWGFRPRSLRVKIFNIQVKEVTVQDSTTTIANNLTSTVQVFTDDDYQLPYVVGNGTEGCLPAFPPQVFTLPQYGYATLNRDNTENPTERSSFFCLEYFPSKMLRTGNNFEFTYNFEEVPFHSSFAPSQNLFKLANPLVDQYLYRFVSTNNTGGVQFNKNLAGRYANTYKNWFPGPMGRTQGWNLGSGVNRASVSAFATTNRMELEGASYQVPPQPNGMTNNLQGSNTYALENTMIFNSQPANPGTTATYLEGNMLITSESETQPVNRVAYNVGGQMATNNQSSTTAPATGTYNLQEIVPGSVWMERDVYLQGPIWAKIPETGAHFHPSPAMGGFGLKHPPPMMLIKNTPVPGNITSFSDVPVSSFITQYSTGQVTVEMEWELKKENSKRWNPEIQYTNNYNDPQFVDFAPDSTGEYRTTRPIGTRYLTRPL

SEQ ID NO: 3244 - protein, 724 aa, Artificial Sequence
  Synthetic polypeptide
MSFVDHPPDWLEEVGEGLREFLGLEAGPPKPKPNQQHQDQARGLVLPGYNYLGPGNGLDRGEPVNRADEVAREHDISYNEQLEAGDNPYLKYNHADAEFQEKLADDTSFGGNLGKAVFQAKKRVLEPFGLVEEGAKTAPTGKRIDDHFPKRKKARTEEDSKPPTSSDAEAGPSGSQQLQIPAQPASSLGADTMSAGGGGPLGDNNQGADGVGNASGDWHCDSTWMGDRVVTKSTRTWVLPSYNNHQYREIKSGSVDGSNANAYFGYSTPWGYFDFNRFHSHWSPRDWQRLINNYWGFRPRSLRVKIFNIQVKEVTVQDSATTIANNLTSTVQVFTDDDYQLPYVVGNGTEGCLPAFPPQVFTLPQYGYATLNRDNTENPTERSSFFCLEYFPSKMLRTGNNFEFTYNFEEVPFHSSFAPSQNLFKLANPLVDQYLYRFVSTNNTGGVQFNKNLAGRYANTYKNWFPGPMGRTQGWNLGSGVNRASVSAFATTNRMELEGASYQVPPQPNGMTNNLQGSNTYALENTMIFNSQPANPGTTATYLEGNMLITSESETQPVNRVAYNVGGQMATNNQSSTTAPATGTYNLQEIVPGSVWMERDVYLQGPIWAKIPETGAHFHPSPAMGGFGLKHPPPMMLIKNTPVPGNITSFSDVPVSSFITQYSTGQVTVEMEWELKKENSKRWNPEIQYTNNYNDPQFVDFAPDSTGEYRTTRPIGTRYLTRPL

SEQ ID NO: 3245 - protein, 724 aa, Artificial Sequence
  Synthetic polypeptide
MSFVDHPPDWLEEVGEGLREFLGLEAGPPKPKPNQQHQDQARGLVLPGYNYLGPGNGLDRGEPVNRADEVAREHDISYNEQLEAGDNPYLKYNHADAEFQEKLADDTSFGGNLGKAVFQAKKRVLEPFGLVEEGAKTAPTGKRIDDHFPKRKKARTEEDSKPSTSSDAEAGPSGSQQPQIPAQPASSLGADTMSAGGGGPLGDNNQGADGVGNASGDWHCDSTWMGDRVVTKSTRTWVLPSYNNHQYREIKSGSVDGSNANAYFGYSTPWGYFDFNRFHSHWSPRDWQRLINNYWGFRPRSLRVKIFNIQVKEVTVQDSTTTIANNLTSTVQVFTDDDYQLPYVVGNGTEGCLPAFPPQVFTLPQYGYATLNRDNTENPTERSSFFCLEYFPSKMLRTGNNFEFTYNFEEVPFHSSFAPSQNLFKLANPLVDQYLYRFVSTNNTGGVQFNKNLAGRYANTYKNWFPGPMGRTQGWNLGSGVNRASVSAFATTNRMELEGASYQVPPQPNGMTNNLQGSNTYALENTMIFNSQPANPGTTATYLEGNMLITSESETQPVNRVAYNVGGQMATNNQSSTTAPATGTYNLQEIVPGSVWMERDVYLQGPIWAKIPETGAHFHPSPAMGGFGLKHPPPMMLIKNTPAPGNITSFSDVPVSSFITQYSTGQVTVEMEWELKKENSKRWNPEIQYTNNYNDPQFVDFAPDSTGEYRTTRPIGTRYLTRPL

SEQ ID NO: 3246 - protein, 724 aa, Artificial Sequence
  Synthetic polypeptide
MSFVDHPPDWLEEVGEGLREFLGLEAGPPKPKPNQQHQDQARGLVLPGYNYLGPGNGLDRGEPVNRADEVAREHDISYNEQLEAGDNPYLKYNHADAEFQEKLADDTSFGGNLGKAVFQAKKRVLEPFGLVEEGAKTAPTGKRIDDHFPKRKKARTEEDSKPPTSSDAEAGPSGSQQLQIPAQPASSLGADTMSAGGGGPLGDNNQGADGVGNASGDWHCDSTWMGDRVVTKSTRTWVLPSYNNHQYREIKSGSVDGSNANAYFGYSTPWGYFDFNRFHSHWSPRDWQRLINNYWGFRPRSLRVKIFNIQVKEVTVQDSTTTIANNLTSTVQVFTDDDYQLPYVVGNGTEGCLPAFPPQVFTLPQYGYATLNRDNTENPTERSSFFCLEYFPSKMLRTGNNFEFTYNFEEVPFHSSFAPSQNLFKLANPLVDQYLYRFVSTNNTGGVQFNKNLAGRYANTYKNWFPGPMGRTQGWNLGSGVNRASVSAFATTNRMELEGASYQVPPQPNGMTNNLQGSNTYALENTMIFNSQPANPGTTATYLEGNMLITSESETQPVNRVAYNVGGQMATNNQSSTTAPATGTYNLQEIVPGSVWMERDVYLQGPIWAKIPETGAHFHPSPAMGGFGLKHPPPMMLIKNTPVPGNITSFSDVPVSSFITQYSTGQVTVEMEWELKKENSKRWNPEIQYTNNYNDPQFVDFAPDSTGEYRTTRPIGTRYLTRPL

SEQ ID NO: 3247 - protein, 724 aa, Artificial Sequence
  Synthetic polypeptide
MSFVDHPPDWLEEVGEGLREFLGLEAGPPKPKPNQQHQDQARGLVLPGYNYLGPGNGLDRGEPVNRADEVAREHDISYNEQLEAGDNPYLKYNHADAEFQEKLADDTSFGGNLGKAVFQAKKRVLEPFGLVEEGAKTAPTGKRIDDHFPKRKKARTEEDSKPPTSSDAEAGPSGSQQLQIPAQPASSLGADTMSAGGGGPLGDNNQGADGVGNASGDWHCDSTWMGDRVVTKSTRTWVPPSYNNHQYREIKSGSVDGSNANAYFGYSTPWGYFDFNRFHSHWSPRDWQRLINNYWGFRPRSLRVKIFNIQVKEVTVQDSTTTIANNLTSTVQVFTDDDYQLPYVVGNGTEGCLPAFPPQVFTLPQYGYATLNRDNTENPTERSSFFCLEYFPSKMLRTGNNFEFTYNFEEVPFHSSFAPSQNLFKLANPLVDQYLYRFVSTNNTGGVQFNKNLAGRYANTYKNWFPGPMGRTQGWNLGSGVNRASVSAFATTNRMELEGASYQVPPQPNGMTNNLQGSNTYALENTMIFNSQPANPGTTATYLEGNMLITSESETQPVNRVAYNVGGQMATNNQSSTTAPATGTYNLQEIVPGSVWMERDVYLQGPIWAKIPETGAHFHPSPAMGGFGLKHPPPMMLIKNTPVPGNITSFSDVPVSSFITQYSTGQVAVEMEWELKKENSKRWNPEIQYTNNYNDPQFVDFAPDSTGEYRTTRPIGTRYLTRPL

SEQ ID NO: 3248 - protein, 724 aa, Artificial Sequence
  Synthetic polypeptide
MSFVDHPPDWLEEVGEGLREFLGLEAGPPKPKPNQQHQDQARGLVLPGYNYLGPGNGLDRGEPVNRADEVAREHDISYNEQLEAGDNPYLKYNHADAEFQEKLADDTSFGGNLGKAVFQAKKRVLEPFGLVEEGAKTAPTGKRIDDHFPKRKKARTEEDSKPSTSSDAEAGPSGSQQLQIPAQPASSLGADTMSAGGGGPLGDNNQGADGVGNASGDWHCDSTWMGDRVVTKSTRTWVLPSYNNHQYREIKSGSVDGSNANAYFGYSTPWGYFDFNRFHSHWSPRDWQRLINNYWGFRPRSLRVKIFNIQVKEVTVQDSTTTIANNLTSTVQVFTDDDYQLPYVVGNGTEGCLPAFPPQVFTLPQYGYATLNRDNTENPTERSSFFCLEYFPSKMLRTGNNFEFTYNFEEVPFHSSFAPSQNLFKLANPLVDQYLYRFVSTNNTGGVQFNKNLAGRYANTYKNWFPGPMGRTQGWNLGSGVNRASVSAFATTNRMELEGASYQVPPQPNGMTNNLQGSNTYALENTMIFNSQPANPGTTATYLEGNMLITSESETQPVNRVAYNVGGQMATNNQSSTTAPATGTYNLQEIVPGSVWMERDVYLQGPIWAKIPETGAHFHPSPAMGGFGLKHPPPMMLIKNTPAPGNITSFSDVPVSSFITQYSTGQVTVEMEWELKKENSKRWNPEIQYTNNYNDPQFVDFAPDSTGEYRTTRPIGTRYLTRPL

SEQ ID NO: 3249 - protein, 724 aa, Artificial Sequence
  Synthetic polypeptide
MSFVDHPPDWLEEVGEGLREFLGLEAGPPKPKPNQQHQDQARGLVLPGYNYLGPGNGLDRGEPVNRADEVAREHDISYNEQLEAGDNPYLKYNHADAEFQEKLADDTSFGGNLGKAVFQAKKRVLEPFGLAEEGAKTAPTGKRIDDHFPKRKKARTEEDSKPSTSSDAEAGPSGSQQLQIPAQPASSLGADTMSAGGGGPLGDNNQGADGVGNASGDWHCDSTWMGDRVVTKSTRTWVLPSYNNHQYREIKSGSVDGSNANAYFGYSTPWGYFDFNRFHSHWSPRDWQRLINNYWGFRPRSLRAKIFNIQVKEVTVQDSTTTIANNLTSTVQVFTDDDYQLPYVVGNGTEGCLPAFPPQVFTLPQYGYATLNRDNTENPTERSSFFCLEYFPSKMLRTGNNLEFTYNFEEVPFHSSFAPSQNLFKLANPLVDQYLYRFVSTNNTGGVQFNKNLAGRYANTYKNWFPGPMGRTQGWNLGSGVNRASVSAFATTNRMELEGASYQVPPQPNGMTNNLQGSNTYALENTMIFNSQPANPGTTATYLEGNMLITSESETQPVNRVVHNVGGQMATNNQSSTTAPATGTYNLQEIVPGSVWMERDVYLQGPIWAKIPETGAHFHPSPAMGGFGLKHPPPMMLIKNTPVPGNITSFSDVPVSSFITQYSTGQVTVEMEWELKKENSKRWNPEIQYTNNYNDPQFVDFAPDSTGEYRTTRPIGTRYLTRPL

SEQ ID NO: 3250 - protein, 724 aa, Artificial Sequence
  Synthetic polypeptide
MSFVDHPPDWLEEVGEGLREFLGLEAGPPKPKPNQQHQDQARGLVLPGYNYLGPGNGLDRGEPVNRADEVAREHDISYNEQLEAGDNPYLKYNHADAEFQEKLADDTSFGGNLGKAVFQAKKRVLEPFGLVEEGAKTAPTGKRIDDHFPKRKKARTEEDSKPSTSSDAEAGPSGSQQLQIPAQPASSLGADTMSAGGGGPLGDNNQGADGVGNASGDWHCDSTWMGDRVVTKSTRTWVLPSYNNHQYREIKSGSVDGGNANAYFGYSTPWGYFDFNRFHSHWSPRDWQRLINNYWGFRPRSLRVKIFNIQVKEVTVQDSTTTIANNLTSTVQVFTDDDYQLPYVVGNGTEGCLPAFPPQVFTLPQYGYATLNRDNTENPTERSSFFCLEYFPSKMLRTGNNFEFTYNFEEVPFHSSFAPSQNLFKLANPLVDQYLYRFVSTNNTGGVQFNKNLAGRYANTYKNWFPGPMGRTQGWNLGSGVNRASVSAFATTNRMELEGASYQVPPQPNGMTNNLQGSNTYALENTMIFNSQPANPGTTATYLEGNMLITSESETQPVNRVAYNVGGQMATNNQSSTTAPATGTYNLQEIVPGSVWMERDVYLQGPIWAKIPETGAHFHPSPAMGGFGLKHPPPMMLIKNTPAPGNITSFSDVPVSSFITQYSTGQVTVEMEWELKKGNSKRWNPEIQYTNNYNDPQFVDFAPDSTGEYRTTRPIGTRYLTRPL

SEQ ID NO: 3251 - protein, 724 aa, Artificial Sequence
  Synthetic polypeptide
MSFVDHPPDWLEEVGEGLREFLGLEAGPPKPKPNQQHQDQARGLVLPGYNYLGPGNGLDRGEPVNRADEVAREHDISYNEQLEAGDNPYLKYNHADAEFQEKLADDTSFGGNLGKAVFQAKKRVLEPFGLVEEGAKTAPTGKRIDDHFPKRKKARTEEDSKPSTSSDAEAGPSGSQQLQIPAQPASSLGADTMSAGGGGPLGDNNQGADGVGNASGDWHCDSTWMGDRVVTKSTRTWVLPSYNNHQYREIKSGSVDGSNANAYFGYSTPWGYFDFNRFHSHWSPRDWQRLINNYWGFRPRSLRVKIFNIQVKEVTVQDSTTTIANNLTSTVQVFTDDDYQLPYVVGNGTEGCLPAFPPQVFTLPQYGYATLNRDNTENPTERSSFFCLEYFPSKMLRTGNNFEFTYNFEEVPFHSSFAPSQNLFKLANPLVDQYLYRFVSTNNTGGVQFNKNLAGRYANTYKNWFPGPMGRTQGWNLGSGVNRASVSAFATTNRMELEGASYQVPPQPNGMTNNLQGSNTYALENTMIFNSQPANPGTTATYLEGNMLITSESETQPVNRVAYNVGGQMATNNQSSTTAPATGTYNLQEIVPGSVWMERDVYLQGPIWAKIPETGVHFHPSPAMGGFGLKHPPPMMLIKNTPVPGNITSFSDVPVSSFITQYSTGQVTVEMEWELKKENSKRWNPEIQYTNNYNDPQFVDFAPDSTGEYRTTRPIGTRYLTRPL

SEQ ID NO: 3252 - protein, 724 aa, Artificial Sequence
  Synthetic polypeptide
  MOD_RES (551)..(551): Any naturally occurring amino acid
MSFVDHPPDWLEEVGEGLREFLGLEAGPPKPKPNQQHQDQARGLVLPGYNYLGPGNGLDRGEPVNRADEVAREHDISYNEQLEAGDNPYLKYNHADAEFQEKLADDTSFGGNLGKAVFQAKKRVLEPFGLVEEGAKTAPTGKRIDDHFPKRKKARTEEDSKPSTSSDAEAGPSGSQQLQIPAQPASSLGADTMSAGGGGPLGDNNQGADGVGNASGDWHCDSTWMGDRVVTKSTRTWVLPSYNNHQYREIKSGSVDGSNANAYFGYSTPWGYFDFNRFHSHWSPRDWQRLINNYWGFRPRSLRVKIFNIQVKEVTVQDSTTTIANNLTSTVQVFTDDDYQLPYVVGNGTEGCLPAFPPQVFTLPQYGYATLNRDNTENPTERSSFFCLEYFPSKMLRTGNNFEFTYNFEEVPFHSSFAPSQNLFKLANPLVDQYLYRFVSTNNTGGVQFNKNLAGRYANTYKNWFPGPMGRTQGWNLGSGVNRASVSAFATTNRMELEGASYQVPPQPNGMTNNLQGSNTYALENTMIFNSQPANPGTTATYLEGSMLITXESETQPVNRVAYNVGGQMATNNQSSTTAPATGTYNLQEIVPGSVWMERDVYLQGPIWAKIPETGAHFHPSPAMGGFGLKHPPPMMLIKNTPVPGNITSFSDVPVSSFITQYSTGQVTVEMEWELKKENSKRWNPEIQYTNNYNDPQFVDFAPDSTGEYRTTRPIGTRYLTRPL

SEQ ID NO: 3253 - protein, 736 aa, Artificial Sequence; identical to SEQ ID NO: 2427
  Synthetic polypeptide

SEQ ID NO: 3254 - protein, 734 aa, Artificial Sequence; identical to SEQ ID NO: 2445
  Synthetic polypeptide

SEQ ID NO: 3255 - protein, 723 aa, Artificial Sequence
  Synthetic polypeptide
MSFVDHPPDWLEEVGEGLREFLGLEAGPPKPKPNQQHQDQARGLVLPGYNYLGPGNGLDRGEPVNRADEVAREHDISYNEQLEAGDNPYLKYNHADAEFQEKLADDTSFGGNLGKAVFQAKKRVLEPFGLVEEGAKTAPTGKRIDDHFPKRKKARTEEDSKPSTSSDAEAGPSGSQQLQIPAQPASSLGADTMSAGGGPLGDNNQGADGVGNASGDWHCDSTWMGDRVVTKSTRTWVLPSYNNHQYREIKSGSVDGSNANAYFGYSTPWGYFDFNRFHSHWSPRDWQRLINNYWGFRPRSLRVKIFNIQVKEVTVQDSTTTIANNLTSTVQVFTDDDYQLPYVVGNGTEGCLPAFPPQVFTLPQYGYATLNRDNTENPTERSSFFCLEYFPSKMLRTGNNFEFTYNFEEVPFHSSFAPSQNLFKLANPLVDQYLYRFVSTNNTGGVQFNKNLAGRYANTYKNWFPGPMGRTQGWNLGSGVNRASVSAFATTNRMELEGASYQVPPQPNGMTNNLQGSNTYALENTMIFNSQPANPGTTATYLEGNMLITSESETQPVNRVAYNVGGQMATNNQSSTTAPATGTYNLQEIVPGSVWMERDVYLQGPIWAKIPETGAHFHPSPAMGGFGLKHPPPMMLIKNTPVPGNITSFSDVPVSSFITQYSTGQVTVEMEWELKKENSKRWNPEIQYTNNYNDPQFVDFAPDSTGEYRTTRPIGTRYLTRPL

SEQ ID NO: 3256 - protein, 534 aa, Artificial Sequence
  Synthetic polypeptide
MAEGGGGAMGDSSGGADGVGNASGNWHCDSQWMGNTVITKTTRTWVLPSYNNHIYKAITSGTSQDANVQYAGYSTPWGYFDFNRFHCHFSPRDWQRLINNHWGIRPKSLKFKIFNVQVKEVTTQDQTKTIANNLTSTIQVFTDDEHQLPYVLGSATEGTMPPFPSDVYALPQYGYCTMHTNQNGARFNDRSAFYCLEYFPSQMLRTGNNFEFTFDFEEVPFHSMFAHSQDLDRLMNPLVDQYLWNFNEVDSSRNAQFKKAVKGAYGTMGRNWLPGPKFLDQRVRAYTGGTDNYANWNIWSNGNKVNLKDRQYLLQPGPVSATYTEGEASSLPAQNILGIAKDPYRSGSTTAGISDIMVTEEQEVAPTNGVGWKPYGRTVTNEQNTTTAPTSSDLDVLGALPGMVWQNRDIYLQGPIGAKIPKTDGKFHPSPNLGGFGLHNPPPQVFIKNTPVPADPPVEYVHQKWNSYITQYSTGQCTVEMVWELRKENSKRWNPEIQFTSNFSNRTSIMFAPNETGGYVEDRLIGTRYLTQNL

SEQ ID NO: 3257 - protein, 554 aa, Artificial Sequence
  Synthetic polypeptide
MTSVNSAEASTGAGGGGSNPVKSMWSEGATFSANSVTCTFSRQFLIPYDPEHHYKVFSPAASSCHNASGKEAKVCTISPIMGYSTPWRYLDFNALNLFFSPLEFQHLIENYGSIAPDALTVTISEIAVKDVTDKTGGGVQVTDSTTGRLCMLVDHEYKYPYVLGQGQDTLAPELPIWVYFPPQYAYLTVGDVNTQGISGDSKKLASEESAFYVLEHSSFQLLGTGGTATMSYKFPPVPPENLEGCSQHFYEMYNPLYGSRLGVPDTLGGDPKFRSLTHEDHAIQPQNFMPGPLVNSVSTKEGDSFNTGAGKALTGLSTGTSQNTRISLRPGPVSQPYHHWDTDKYVTGINAISHGQTTYGNAEDKEYQQGVGRFPNEKEQLKQLQGLNMHTYFPNKGTQQYTDQIERPLMVGSVWNRRALHYESQLWSKIPNLDDSFKTQFAALGGWGLHQPPPQIFLKILPQSGPIGGIKSMGITTLVQYAVGIMTVTMTFKLGPRKATGRWNPQPGVYPPHAAGHLPYVLYDPTATDAKQHHRHGYEKPEELWTAKSRVHPL

SEQ ID NO: 3258 - protein, 587 aa, Artificial Sequence
  Synthetic polypeptide
MSDGTSQPDGGNAVHSAARVERAADGPGGSGGGGSGGGGVGVSTGSYDNQTHYRFLGDGWVEITALATRLVHLNMPKSENYCRIRVHNTTDTSVKGNMAKDDAHEQIWTPWSLVDANAWGVWLQPSDWQYICNTMSQLNLVSLDQEIFNVVLKTVTEQDSGGQAIKIYNNDLTACMMVAVDSNNILPYTPAANSMETLGFYPWKPTIASPYRYYFCVDRDLSVTYENQEGTIEHNVMGTPKGMNSQFFTIENTQQITLLRTGDEFATGTYYFDTNPVKLTHTWQTNRQLGQPPLLSTFPEADTDAGTLTAQGSRHGATQMEVNWVSEAIRTRPAQVGFCQPHNDFEASRAGPFAAPKVPADVTQGMDREANGSVRYSYGKQHGENWAAHGPAPERYTWDETNFGSGRDTRDGFIQSAPLVVPPPLNGILTNANPIGTKNDIHFSNVFNSYGPLTTFSHPSPVYPQGQIWDKELDLEHKPRLHITAPFVCKNNAPGQMLVRLGPNLTDQYDPNGATLSRIVTYGTFFWKGKLTMRAKLRANTTWNPVYQVSVEDNGNSYMSVTKWLPTATGNMQSVPLITRPVARNTY

SEQ ID NO: 3259 - protein, 584 aa, Artificial Sequence
  Synthetic polypeptide
MSDGAVQPDGGQPAVRNERATGSGNGSGGGGGGGSGGVGISTGTFNNQTEFKFLENGWVEITANSSRLVHLNMPESENYKRVVVNNMDKTAVKGNMALDDIHVEIVTPWSLVDANAWGVWFNPGDWQLIVNTMSELHLVSFEQEIFNVVLKTVSESATQPPTKVYNNDLTASLMVALDSNNTMPFTPAAMRSETLGFYPWKPTIPTPWRYYFQWDRTLIPSHTGTSGTPTNVYHGTDPDDVQFYTIENSVPVHLLRTGDEFATGTFFFDCKPCRLTHTWQTNRALGLPPFLNSLPQSEGATNFGDIGVQQDKRRGVTQMGNTDYITEATIMRPAEVGYSAPYYSFEASTQGPFKTPIAAGRGGAQTDENQAADGDPRYAFGRQHGQKTTTTGETPERFTYIAHQDTGRYPEGDWIQNINFNLPVTNDNVLLPTDPIGGKTGINYTNIFNTYGPLTALNNVPPVYPNGQIWDKEFDTDLKPRLHINAPFVCQNNCPGQLFVKVAPNLTNQYDPDASANMSRIVTYSDFWWKGKLVFKAKLRASHTWNPIQQMSINVDNQFNYVPNNIGAMKIVYEKSQLAPRKLY

SEQ ID NO: 3260 - protein, 548 aa, Artificial Sequence
  Synthetic polypeptide
GVGISTGTFNNQTEFKFLENGWVEITANSSRLVHLNMPESENYRRVVVNNMDKTAVNGNMALDDIHAQIVTPWSLVDANAWGVWFNPGDWQLIVNTMSELHLVSFEQEIFNVVLKTVSESATQPPTKVYNNDLTASLMVALDSNNTMPFTPAAMRSETLGFYPWKPTIPTPWRYYFQWDRTLIPSHTGTSGTPTNIYHGTDPDDVQFYTIENSVPVHLLRTGDEFATGTFFFDCKPCRLTHTWQTNRALGLPPFLNSLPQSEGATNFGDIGVQQDKRRGVTQMGNTNYITEATIMRPAEVGYSAPYYSFEASTQGPFKTPIAAGRGGAQTDENQAADGNPRYAFGRQHGQKTTTTGETPERFTYIAHQDTGRYPEGDWIQNINFNLPVTNDNVLLPTDPIGGKTGINYTNIFNTYGPLTALNNVPPVYPNGQIWDKEFDTDLKPRLHVNAPFVCQNNCPGQLFVKVAPNLTNEYDPDASANMSRIVTYSDFWWKGKLVFKAKLRASHTWNPIQQMSINVDNQFNYVPSNIGGMKIVYEKSQLAPRKLY

SEQ ID NO: 3261 - protein, 736 aa, Artificial Sequence; identical to SEQ ID NO: 2489
  Synthetic polypeptide

SEQ ID NO: 3262 - protein, 736 aa, Artificial Sequence; identical to SEQ ID NO: 2484
  Synthetic polypeptide

SEQ ID NO: 3263 - protein, 736 aa, Artificial Sequence
  Synthetic polypeptide
MAADGYLPDWLEDTLSEGIRQWWKLKPGPPPPKPAERHKDDSRGLVLPGYKYLGPFNGLDKGEPVNEADAAALEHDKAYDRQLDSGDNPYLKYNHADAEFQERLKEDTSFGGNLGRAVFQAKKRVLEPLGLVEEPVKTAPGKKRPVEHSPVEEPDSSSGTGKAGQQPARKRLNFGQTGDADSVPDPQPLGQPPAAPSGLGTNTMATGSGAPMADNNEGADGVGNSSGNWHCDSTWMGDRVITTSTRTWALPTYNNHLYKQISSQSGASNDNHYFGYSTPWGYFDFNRFHCHFSPRDWQRLINNNWGFRPKRLNFKLFNIQVKEVTQNDGTTTIANNLTSTVQVFTDSEYQLPYVLGSAHQGCLPPFPADVFMVPQYGYLTLNNGSQAVGRSSFYCLEYFPSQMLRTGNNFTFSYTFEDVPFHSSYAHSQSLDRLMNPLIDQYLYYLSRTNTPSGTTTQSRLQFSQAGASDIRDQSRNWLPGPCYRQQRVSKTSADNNNSEYSWTGATKYHLNGRDSLVNPGPAMASHKDDEEKFFPQSGVLIFGKQGSEKTNVDIEKVMITDEEEIRTTNPVATEQYGSVSTNLQRGNRQAATADVNTQGVLPGMVWQDRDVYLQGPIWAKIPHTDGHFHPSPLMGGFGLKHPPPQILIKNTPVPANPSTTFSAAKFASFITQYSTGQVSVEIEWELQKENSKRWNPEIQYTSNYNKSVNVDFTVDTNGVYSEPRPIGTRYLTRNL

SEQ ID NO: 3264 - protein, 736 aa, Artificial Sequence
  Synthetic polypeptide
MAADGYLPDWLEDNLSEGIREWWDLKPGAPKPKANQQKQDDGRGLVLPGYKYLGPFNGLDKGEPVNAADAAALEHDKAYDQQLKAGDNPYLRYNHADAEFQERLQEDTSFGGNLGRAVFQAKKRVLEPFGLVEEGAKTAPGKKRPVEQSPQEPDSSSGIGKTGQQPAKKRLNFGQTGDSESVPDPQPLGEPPATPAAVGPTTMASGGGAPMADNNEGADGVGNASGNWHCDSTWLGDRVITTSTRTWALPTYNNHLYKQISSASTGASNDNHYFGYSTPWGYFDFNRFHCHFSPRDWQRLINNNWGFRPKRLNFKLFNVQVKEVTTNDGVTTIANNLTSTVQVFSDSEYQLPYVLGSAHQGCLPPFPADVFMIPQYGYLTLNNGSQAVGRSSFYCLEYFPSQMLRTGNNFTFSYTFEDVPFHSSYAHSQSLDRLMNPLIDQYLYYLNRTQDQSGSAQNKDLLFSRGSPAGMSVQPKNWLPGPCYRQQRVSKTKTDNNNSNFTWTGASKYNLNGRESIINPGTAMASHKDDKNKFFPMSGVMIFGKESAGASNTALDNVMITDEEEIKATNPVATERFGTVAVNLQSSSTDPATGDVHVMGALPGMVWQDRDVYLQGPIWAKIPHTDGHFHPSPLMGGFGLKNPPPQILIKNTPVPANPPAEFSATKFASFITQYSTGQVSVEIEWELQKENSKRWNPEVQYTSNYAKSANVDFTVDNNGLYTEPRPIGTRYLTRPL

SEQ ID NO: 3265 - protein, 737 aa, Artificial Sequence
  Synthetic polypeptide
MAADGYLPDWLEDTLSEGIRQWWKLKPGPPPPKPAERHKDDSRGLVLPGYKYLGPGNGLDKGEPVNAADAAALEHDKAYDQQLKAGDNPYLKYNHADAEFQERLKEDTSFGGNLGRAVFQAKKRVLEPLGLVEEGAKTAPGKKRPVEPSPQRSPDSSTGIGKKGQQPARKRLNFGQTGDSESVPDPQPLGEPPATPAAVGPTTMASGGGAPMADNNEGADGVGNASGNWHCDSTWLGDRVITTSTRTWALPTYNNHLYKQISSASTGASNDNHYFGYSTPWGYFDFNRFHCHFSPRDWQRLINNNWGFRPKRLNFKLFNIQVKEVTTNDGVTTIANNLTSTVQVFSDSEYQLPYVLGSAHQGCLPPFPADVFMIPQYGYLTLNNGSQAVGRSSFYCLEYFPSQMLRTGNNFTFSYTFEDVPFHSSYAHSQSLDRLMNPLIDQYLYYLNRTQNQSGSAQNKDLLFSRGSPAGMSVQPKNWLPGPCYRQQRVSKTKTDNNNSNFTWTGASKYNLNGRESIINPGTAMASHKDDKDKFFPMSGVMIFGKESAGASNTALDNVMITDEEEIKATNPVATERFGTVAVNLQSSSTDPATEDVHVMGALPGMVWQDRDVYLQGPIWAKIPHTDGHFHPSPLMGGFGLKNPPPQILIKNTPVPANPPAEFSATKFASFITQYSTGQVSVEIEWELQKENSKRWNPEVQYTSNYAKSANVDFTVDNNGLYTEPRPIGTRYLTRNL

SEQ ID NO: 3266 - protein, 736 aa, Artificial Sequence
  Synthetic polypeptide
MAADGYLPDWLEDNLSEGIREWWDLKPGAPKPKANQQKQDDGRGLVLPGYKYLGPFNGLDKGEPVNAADAAALEHDKAYDQQLKAGDNPYLRYNHADAEFQERLQEDTSFGGNLGRAVFQAKKRVLEPFGLVEEGAKTAPGKKRPVEQSPQEPDSSSGIGKTGQQPAKKRLNFGQTGDSESVPDPQPLGEPPATPAAVGPTTMASGGGAPMADNNEGADGVGNASGNWHCDSTWLGDRVITTSTRTWALPTYNNHLYKQISSASTGASNDNHYFGYSTPWGYFDFNRFHCHFSPRDWQRLINNNWGFRPKRLNFKLFNVQVKEVTTNDGVTTIANNLTSTVQVFSDSEYQLPYVLGSAHQGCLPPFPADVFMIPQYGYLTLNNGSQAVGRSSFYCLEYFPSQMLRTGNNFTFSYTFEDVPFHSSYAHSQSLDRLMNPLIDQYLYYLNRTQDQSGSAQNKDLLFSRGSPAGMSVQPKNWLPGPCYRQQRVSKTKTDNNNSNFTWTGASKYNLNGRESIINPGTAMASHKDDKNKFFPMSGVMIFGKESAGASNTALDNVMITDEEEIKATNPVATERFGTVAVNLQSSSTDPATGDVHVMGALPGMVWQDRDVYLQGPIWAKIPHTDGHFHPSPLMGGFGLKHPPPQILIKNTPVPANPPAEFSATKFASFITQYSTGQVSVEIEWELQKENSKRWNPEVQYTSNYAKSANVDFTVDNNGLYTEPRPIGTRYLTRPL

SEQ ID NO: 3267 - protein, 736 aa, Artificial Sequence
  Synthetic polypeptide
MAADGYLPDWLEDNLSEGIREWWDLKPGAPKPKANQQKQDDGRGLVLPGYKYLGPFNGLDKGEPVNAADAAALEHDKAYDQQLKAGDNPYLRYNHADAEFQERLQEDTSFGGNLGRAVFQAKKRVLEPFGLVEEGAKTAPGKKRPVEQSPQEPDSSSGIGKTGQQPAKKRLNFGQTGDSESVPDPQPLGEPPATPAAVGPTTMASGGGAPMADNNEGADGVGNASGNWHCDSTWLGDRVITTSTRTWALPTYNNHLYKQISSASTGASNDNHYFGYSTPWGYFDFNRFHCHFSPRDWQRLINNNWGFRPKRLNFKLFNVQVKEVTTNDGVTTIANNLTSTVQVFSDSEYQLPYVLGSAHQGCLPPFPADVFMIPQYGYLTLNNGSQAVGRSSFYCLEYFPSQMLRTGNNFTFSYTFEDVPFHSSYAHSQSLDRLMNPLIDQYLYYLNRTQDQSGSAQNKDLLFSRGSPAGMSVQPKNWLPGPCYRQQRVSKTKTDNNNSNFTWTGASKYNLNGRESIINPGTAMASHKDDKDKFFPMSGVMIFGKESAGASNTALDNVMITDEEEIKATNPVATERFGTVAVNLQSSSTDPATGDVHVMGALPGMVWQDRDVYLQGPIWAKIPHTDGHFHPSPLMGGFGLKHPPPQILIKNTPVPANPPAEFSATKFASFITQYSTGQVSVEIEWELQKENSKRWNPEVQYTSNYAKSANVDFTVDNNGLYTEPRPIGTRYLTRPL

SEQ ID NO: 3268 - protein, 736 aa, Artificial Sequence
  Synthetic polypeptide
MAADGYLPDWLEDNLSEGIREWWDLKPGAPKPKANQQKQDDGRGLVLPGYKYLGPFNGLDKGEPVNAADAAALEHDKAYDQQLKAGDNPYLRYNHADAEFQERLQEDTSFGGNLGRAVFQAKKRVLEPFGLVEEGAKTAPGKKRPVEQSPQEPDSSSGIGKTGQQPAKKRLNFGQTGDSESVPDPQPLGEPPATPAAVGPTTMASGGGAPMADNNEGADGVGNASGNWHCDSTWLGDRVITTSTRTWALPTYNNHLYKQISSASTGASNDNHYFGYSTPWGYFDFNRFHCHFSPRDWQRLINNNWGFRPKRLNFKLFNIQVKEVTTNDGVTTIANNLTSTVQVFSDSEYQLPYVLGSAHQGCLPPFPADVFMIPQYGYLTLNNGSQAVGRSSFYCLEYFPSQMLRTGNNFTFSYTFEDVPFHSSYAHSQSLDRLMNPLIDQYLYYLNRTQDQSGSAQNKDLLFSRGSPAGMSVQPKNWLPGPCYRQQRVSKTKTDNNNSNFTWTGASKYNLNGRESIINPGTAMASHKDDKNKFFPMSGVMIFGKESAGASNTALDNVMITDEEEIKATNPVATERFGTVAVNLQSSSTDPATGDVHVMGALPGMVWQDRDVYLQGPIWAKIPHTDGHFHPSPLMGGFGLKHPPPQILIKNTPVPANPPAEFSATKFASFITQYSTGQVSVEIEWELQKENSKRWNPEVQYTSNYAKSANVDFTVDNNGLYTEPRPIGTRYLTRPL

SEQ ID NO: 3269 - protein, 736 aa, Artificial Sequence
  Synthetic polypeptide
MAADGYLPDWLEDNLSEGIREWWDLKPGAPKPKANQQKQDDGRGLVLPGYKYLGPFNGLDKGEPVNAADAAALEHDKAYDQQLKAGDNPYLRYNHADAEFQERLQEDTSFGGNLGRAVFQAKKRVLEPFGLVEEGAKTAPGKKRPVEQSPQEPDSSSGIGKTGQQPAKKRLNFGQTGDSESVPDPQPLGEPPATPAAVGPTTMASGGGAPMADNNEGADGVGNASGNWHCDSTWLGDRVITTSTRTWALPTYNNHLYKQISSASTGASNDNHYFGYSTPWGYFDFNRFHCHFSPRDWQRLINNNWGFRPKRLNFKLFNVQVKEVTTNDGVTTIANNLTSTVQVFSDSEYQLPYVLGSAHQGCLPPFPADVFMIPQYGYLTLNNGSQAVGRSSFYCLEYFPSQMLRTGNNFTFSYTFEDVPFHSSYAHSQSLDRLMNPLIDQYLYYLNRTQNQSGSAQNKDLLFSRGSPAGMSVQPKNWLPGPCYRQQRVSKTKTDNNNSNFTWTGASKYNLNGRESIINPGTAMASHKDDKDKFFPMSGVMIFGKESAGASNTALDNVMITDEEEIKATNPVATERFGTVAVNLQSSSTDPATGDVHVMGALPGMVWQDRDVYLQGPIWAKIPHTDGHFHPSPLMGGFGLKHPPPQILIKNTPVPANPPAEFSATKFASFITQYSTGQVSVEIEWELQKENSKRWNPEVQYTSNYAKSANVDFTVDNNGLYTEPRPIGTRYLTRPL

SEQ ID NO: 3270 - protein, 736 aa, Artificial Sequence
  Synthetic polypeptide
MAADGYLPDWLEDNLSEGIREWWDLKPGAPKPKANQQKQDDGRGLVLPGYKYLGPFNGLDKGEPVNAADAAALEHDKAYDQQLKAGDNPYLRYNHADAEFQERLQEDTSFGGNLGRAVFQAKKRVLEPFGLVEEGAKTAPGKKRPVEQSPQEPDSSSGIGKTGQQPAKKRLNFGQTGDSESVPDPQPLGEPPATPAAVGPTTMASGGGAPMADNNEGADGVGNASGNWHCDSTWLGDRVITTSTRTWALPTYNNHLYKQISSASTGASNDNHYFGYSTPWGYFDFNRFHCHFSPRDWQRLINNNWGFRPKRLNFKLFNVQVKEVTTNDGVTTIANNLTSTVQVFSDSEYQLPYVLGSAHQGCLPPFPADVFMIPQYGYLTLNNGSQAVGRSSFYCLEYFPSQMLRTGNNFTFSYTFEDVPFHSSYAHSQSLDRLMNPLIDQYLYYLNRTQNQSGSAQNKDLLFSRGSPAGMSVQPKNWLPGPCYRQQRVSKTKTDNNNSNFTWTGASKYNLNGRESIINPGTAMASHKDDKNKFFPMSGVMIFGKESAGASNTALDNVMITDEEEIKATNPVATERFGTVAVNLQSSSTDPATGDVHVMGALPGMVWQDRDVYLQGPIWAKIPHTDGHFHPSPLMGGFGLKHPPPQILIKNTPVPANPPAEFSATKFASFITQYSTGQVSVEIEWELQKENSKRWNPEVQYTSNYAKSANVDFTVDNNGLYTEPRPIGTRYLTRPL

SEQ ID NO: 3271 - DNA, 2217 bp, Artificial Sequence
  Synthetic polynucleotide
atggctgccgatggttatcttccagattggctcgaggacaacctctctgagggcattcgcgagtggtgggacctgaaacctggagccccgaaacccaaagccaaccagcaaaagcaggacaacggccggggtctggtgcttcctggctacaagtacctcggacccttcaacggactcgacaagggggagcccgtcaacgcggcggacgcagcggccctcgagcacgacaaggcctacgaccagcagctccaagcgggtgacaatccgtacctgcggtataatcacgccgacgccgagtttcaggagcgtctgcaagaagatacgtcttttgggggcaacctcgggcgcgcagtcttccaggccaaaaagcgggttctcgaacctctgggcctggttgaatcgccggttaagacggctcctggaaagaagagaccggtagagccatcaccccagcgctctccagactcctctacgggcatcggcaagaaaggccagcagcccgcaaaaaagagactcaattttgggcagactggcgactcagagtcagtccccgaccctcaaccaatcggagaaccaccagcaggcccctctggtctgggatctggtacaatggctgcaggcggtggcgctccaatggcagacaataacgaaggcgccgacggagtgggtagttcctcaggaaattggcattgcgattccacatggctgggcgacagagtcatcaccaccagcacccgcacctgggccctgcccacctacaacaaccacctctacaagcaaatctccaacgggacctcgggaggaagcaccaacgacaacacctacttcggctacagcaccccctgggggtattttgacttcaacagattccactgccacttttcaccacgtgactggcagcgactcatcaacaacaactggggattccggcccaagaggctcaacttcaagctcttcaacatccaagtcaaggaggtcacgcagaatgaaggcaccaagaccatcgccaataaccttaccagcacgattcaggtctttacggactcggaataccagctcccgtacgtgctcggctcggcgcaccagggctgcctgcctccgttcccggcggacgtcttcatgattcctcagtacgggtacctgactctgaacaatggcagtcaggctgtgggccggtcgtccttctactgcctggagtactttccttctcaaatgctgagaacgggcaacaactttgaattcagctacaacttcgaggacgtgcccttccacagcagctacgcgcacagccagagcctggaccggctgatgaaccctctcatcgaccagtacttgtactacctgtcccggactcaaagcacgggcggtactgcaggaactcagcagttgctattttctcaggccgggcctaacaacatgtcggctcaggccaagaactggctacccggtccctgctaccggcagcaacgcgtctccacgacactgtcgcagaacaacaacagcaactttgcctggacgggtgccaccaagtatcatctgaatggcagagactctctggtgaatcctggcgttgccatggctacccacaaggacgacgaagagcgattttttccatccagcggagtcttaatgtttgggaaacagggagctggaaaagacaacgtggactatagcagcgtgatgctaaccagcgaggaagaaataaagaccaccaacccagtggccacagaacagtacggcgtggtggccgataacctgcaacagcaaaacgccgctcctattgtaggggccgtcaatagtcaaggagccttacctggcatggtgtggcagaaccgggacgtgtacctgcagggtcccatctgggccaagattcctcatacggacggcaactttcatccctcgccgctgatgggaggctttggactgaagcatccgcctcctcagatcctgattaaaaacacacctgttcccgcggatcctccgaccaccttcaatcaggccaagctggcttctttcatcacgcagtacagtaccggccaggtcagcgtggagatcgagtgggagctgcagaaggagaacagcaaacgctggaacccagagattcagtacacttccaactactacaaatctacaaatgtggactttgctgtcaatactgagggtacttattccgagcctcgccccattggcacccgttacctcacccgtaatctgtaa

SEQ ID NO: 3272 - protein, 738 aa, Artificial Sequence
  Synthetic polypeptide
MAADGYLPDWLEDNLSEGIREWWDLKPGAPKPKANQQKQDNGRGLVLPGYKYLGPFNGLDKGEPVNAADAAALEHDKAYDQQLQAGDNPYLRYNHADAEFQERLQEDTSFGGNLGRAVFQAKKRVLEPLGLVESPVKTAPGKKRPVEPSPQRSPDSSTGIGKKGQQPAKKRLNFGQTGDSESVPDPQPIGEPPAGPSGLGSGTMAAGGGAPMADNNEGADGVGSSSGNWHCDSTWLGDRVITTSTRTWALPTYNNHLYKQISNGTSGGSTNDNTYFGYSTPWGYFDFNRFHCHFSPRDWQRLINNNWGFRPKRLNFKLFNIQVKEVTQNEGTKTIANNLTSTIQVFTDSEYQLPYVLGSAHQGCLPPFPADVFMIPQYGYLTLNNGSQAVGRSSFYCLEYFPSQMLRTGNNFEFSYNFEDVPFHSSYAHSQSLDRLMNPLIDQYLYYLSRTQSTGGTAGTQQLLFSQAGPNNMSAQAKNWLPGPCYRQQRVSTTLSQNNNSNFAWTGATKYHLNGRDSLVNPGVAMATHKDDEERFFPSSGVLMFGKQGAGKDNVDYSSVMLTSEEEIKTTNPVATEQYGVVADNLQQQNAAPIVGAVNSQGALPGMVWQNRDVYLQGPIWAKIPHTDGNFHPSPLMGGFGLKHPPPQILIKNTPVPADPPTTFNQAKLASFITQYSTGQVSVEIEWELQKENSKRWNPEIQYTSNYYKSTNVDFAVNTEGTYSEPRPIGTRYLTRNL

SEQ ID NO: 3273 - protein, 738 aa, Artificial Sequence; identical to SEQ ID NO: 3272
  Synthetic polypeptide

SEQ ID NO: 3274 - DNA, 4472 bp, Artificial Sequence
  Synthetic polynucleotide
ctccatcactaggggtaaccgcgaagcgcctcccacgctgccgcgtcagcgctgacgtaaattacgtcataggggagtggtcctgtattagctgtcacgtgagtgcttttgcgacattttgcgacaccacgtggccattcatggtatatatggccgagtgagcgagcaggatctccattttgaccgcgaaatttgaacgagcagcagccatgccgggcttctacgagatcgtgcttaaggtgccgagcgacctggacgagcacctgccgggcatttctgactcgtttgtgaactgggtggcagagaaggaatgggagctgcccccggattctgacatggatcggaatctgattgagcaggcacccctgaccgtggccgagaagctacagcgcgacttcctggtccaatggcgccgcgtgagtaaggccccggaggccctcttctttgttcagttcgagaagggcgagtcctacttccacctccatattctggtagagaccacgggggtcaaatccatggtgctgggccgcttcctgagtcagattcgggacaagctggtgcagaccatctaccgcgggatcgagccgaccctgcccaactggttcgcggtgacaaagacgcgtaatggcgccggaggggggaacaaggtggtggacgagtgctacatccccaactacctgctgcccaagactcagcccgagctgcagtgggcgtggactaacatggaggagtatataagcgcgtgcttgaacctggccgagcgcaaacggctcgtggcgcagcacctgacccacgtcagccagacccaggagcagaacaaggagaatctgaacccgaattctgacgcgcctgtcatccggtcaaaaacctccgcgcgctacatggagctggtcgggtggctggtggaccggggcatcacctccgagaagcagtggatccaggaggaccaggcctcgtacatctccttcaacgccgcctccaactcgcggtctcagatcaaggccgcgctggacaatgccggcaagatcatggcgctgaccaaatccgcgcccgactacctggtaggccccgctctgcccgcggacattaaatccaaccgcatctaccgcatcctggagctgaatggctacgaccctgcctacgccggttccgtctttctcggctgggcccagaaaaagtttggcaaaaggaacaccatctggctgtttgggccggccaccacgggcaagaccaacatcgcggaagccatcgcccacgccgtgcccttctacggctgcgtcaactggaccaatgagaactttcccttcaacgattgcgtcgacaagatggtgatctggtgggaggagggcaagatgacggccaaggtcgtggagtccgccaaggccattctcggcggcagcaaggtgcgcgtggaccaaaagtgcaagtcgtccgcccagatcgatcccacccccgtgatcgtcacctccaacaccaacatgtgcgccgtgattgacgggaacagcaccaccttcgagcaccagcagccgttgcaggaccggatgttcaaatttgaacttacccgccgtctggagcacgactttggcaaggtgacaaagcaggaagtcaaagagttcttccgctgggcgcaggatcacgtgaccgaggtggcgcatgagttctacgtcagaaagggtggagctaacaaaagacccgcccccgatgacgcggatataagcgagcccaagcgggcctgcccctcagtcgcggatccatcgacgtcagacgcggaaggagctccggtggactttgccgacaggtaccaaaacaaatgttctcgtcacgcgggcatgcttcagatgctgtttccctgcaaaacatgcgagagaatgaatcagaatttcaacatttgcttcacgcacgggaccagagactgttcagaatgtttccctggcgtgtcagaatctcaaccggtcgtcagaaaaaagacgtatcggaaactctgtgcgattcatcatctgctggggcgggcacccgagattgcttgctcggcctgcgacctggtcaacgtggacctggatgactgtgtttctgagcaataaatgacttaaaccaggtatggctgccgatggttatcttccagattggctcgaggacaacctctctgagggcattcgcgagtggtgggacctgaaacctggagccccgaaacccaaagccaaccagcaaaagcaggacaacggccggggtctggtgcttcctggctacaagtacctcggacccttcaacggactcgacaagggggagcccgtcaacgcggcggacgcagcggccctcgagcacgacaaggcctacgaccagcagctccaagcgggtgacaatccgtacctgcggtataatcacgccgacgccgagtttcaggagcgtctgcaagaagatacgtcttttgggggcaacctcgggcgcgcagtcttccaggccaaaaagcgggttctcgaacctctgggcctggttgaatcgccggttaagacggctcctggaaagaagagaccggtagagccatcaccccagcgctctccagactcctctacgggcatcggcaagaaaggccagcagcccgcaaaaaagagactcaattttgggcagactggcgactcagagtcagtccccgaccctcaaccaatcggagaaccaccagcaggcccctctggtctgggatctggtacaatggctgcaggcggtggcgctccaatggcagacaataacgaaggcgccgacggagtgggtagttcctcaggaaattggcattgcgattccacatggctgggcgacagagtcatcaccaccagcacccgcacctgggccctgcccacctacaacaaccacctctacaagcaaatctccaacgggacctcgggaggaagcaccaacgacaacacctacttcggctacagcaccccctgggggtattttgacttcaacagattccactgccacttttcaccacgtgactggcagcgactcatcaacaacaactggggattccggcccaagaggctcaacttcaagctcttcaacatccaagtcaaggaggtcacgcagaatgaaggcaccaagaccatcgccaataaccttaccagcacgattcaggtctttacggactcggaataccagctcccgtacgtgctcggctcggcgcaccagggctgcctgcctccgttcccggcggacgtcttcatgattcctcagtacgggtacctgactctgaacaatggcagtcaggctgtgggccggtcgtccttctactgcctggagtactttccttctcaaatgctgagaacgggcaacaactttgaattcagctacaacttcgaggacgtgcccttccacagcagctacgcgcacagccagagcctggaccggctgatgaaccctctcatcgaccagtacttgtactacctgtcccggactcaaagcacgggcggtactgcaggaactcagcagttgctattttctcaggccgggcctaacaacatgtcggctcaggccaagaactggctacccggtccctgctaccggcagcaacgcgtctccacgacactgtcgcagaacaacaacagcaactttgcctggacgggtgccaccaagtatcatctgaatggcagagactctctggtgaatcctggcgttgccatggctacccacaaggacgacgaagagcgattttttccatccagcggagtcttaatgtttgggaaacagggagctggaaaagacaacgtggactatagcagcgtgatgctaaccagcgaggaagaaataaagaccaccaacccagtggccacagaacagtacggcgtggtggccgataacctgcaacagcaaaacgccgctcctattgtaggggccgtcaatagtcaaggagccttacctggcatggtgtggcagaaccgggacgtgtacctgcagggtcccatctgggccaagattcctcatacggacggcaactttcatccctcgccgctgatgggaggctttggactgaagcatccgcctcctcagatcctgattaaaaacacacctgttcccgcggatcctccgaccaccttcaatcaggccaagctggcttctttcatcacgcagtacagtaccggccaggtcagcgtggagatcgagtgggagctgcagaaggagaacagcaaacgctggaacccagagattcagtacacttccaactactacaaatctacaaatgtggactttgctgtcaatactgagggtacttattccgagcctcgccccattggcacccgttacctcacccgtaatctgtaattacatgttaatcaataaaccggttaattcgtttcagttgaactttggtctcctgtccttcttatcttatcggttaccatagaaactggttacttattaactgcttggtgcgcttcgcgataaaagacttacgtcatcgggttacccctagtgatgga

SEQ ID NO: 3275 - protein, 738 aa, Artificial Sequence
  Synthetic polypeptide
MAADGYLPDWLEDNLSEGIREWWDLKPGAPKPKANQQKQDNGRGLVLPGYKYLGPFNGLDKGEPVNAADAAALEHDKAYDQQLQAGDNPYLRYNHADAEFQERLQEDTSFGGNLGRAVFQAKKRVLEPLGLVESPVKTAPGKKRPVEPSPQRSPDSSTGIGKKGQQPAKKRLNFGQTGDSESVPDPQPIGEPPAAPSGVGPNTMAAGGGAPMADNNEGADGVGSSSGNWHCDSTWLGDRVITTSTRTWALPTYNNHLYKQISNGTSGGSTNDNTYFGYSTPWGYFDFNRFHCHFSPRDWQRLINNNWGFRPKRLNFKLFNIQVKEVTQNEGTKTIANNLTSTIQVFTDSEYQLPYVLGSAHQGCLPPFPADVFMIPQYGYLTLNNGSQAVGRSSFYCLEYFPSQMLRTGNNFEFSYNFEDVPFHSSYAHSQSLDRLMNPLIDQYLYYLSRTQSTGGTAGTQQLLFSQAGPNNMSAQAKNWLPGPCYRQQRVSTTLSQNNNSNFAWTGATKYHLNGRDSLVNPGVAMATHKDDEERFFPSSGVLMFGKQGAGKDNVDYSSVMLTSEEEIKTTNPVATEQYGVVADNLQQQNAAPIVGAVNSQGALPGMVWQNRDVYLQGPIWAKIPHTDGNFHPSPLMGGFGLKHPPPQILIKNTPVPADPPTTFNQAKLASFITQYSTGQVSVEIEWELQKENSKRWNPEIQYTSNYYKSTNVDFAVNTEGTYSEPRPIGTRYLTRNL

SEQ ID NO: 3276 - protein, 738 aa, Artificial Sequence
  Synthetic polypeptide
MAADGYLPDWLEDNLSEGIREWWDLKPGAPKPKANQQRQDNGRGLVLPGYRYLGPFNGLDKGEPVNAADAAALEHDRAYDQQLQAGDNPYLRYNHADAEFQERLQEDTSFGGNLGRAVFQAKKRVLEPLGLVESPVRTAPGKKRPVEPSPQRSPDSSTGIGKKGQQPARKRLNFGQTGDSESVPDPQPIGEPPAAPSGVGPNTMAAGGGAPMADNNEGADGVGSSSGNWHCDSTWLGDRVITTSTRTWALPTYNNHLYRQISNGTSGGSTNDNTYFGYSTPWGYFDFNRFHCHFSPRDWQRLINNNWGFRPKRLNFKLFNIQVKEVTQNEGTRTIANNLTSTIQVFTDSEYQLPYVLGSAHQGCLPPFPADVFMIPQYGYLTLNNGSQAVGRSSFYCLEYFPSQMLRTGNNFEFSYNFEDVPFHSSYAHSQSLDRLMNPLIDQYLYYLSRTQSTGGTAGTQQLLFSQAGPNNMSAQAKNWLPGPCYRQQRVSTTLSQNNNSNFAWTGATKYHLNGRDSLVNPGVAMATHRDDEERFFPSSGVLMFGRQGAGRDNVDYSSVMLTSEEEIRTTNPVATEQYGVVADNLQQQNAAPIVGAVNSQGALPGMVWQNRDVYLQGPIWAKIPHTDGNFHPSPLMGGFGLKHPPPQILIKNTPVPADPPTTFNQAKLASFITQYSTGQVSVEIEWELQKENSKRWNPEIQYTSNYYKSTNVDFAVNTEGTYSEPRPIGTRYLTRNL

SEQ ID NO: 3277 - protein, 738 aa, Artificial Sequence
  Synthetic polypeptide
MAADGYLPDWLEDNLSEGIREWWDLKPGAPKPKANQQRQDNGRGLVLPGYRYLGPFNGLDKGEPVNAADAAALEHDRAYDQQLQAGDNPYLRYNHADAEFQERLQEDTSFGGNLGRAVFQAKKRVLEPLGLVESPVRTAPGKKRPVEPSPQRSPDSSTGIGKRGQQPARKRLNFGQTGDSESVPDPQPIGEPPAAPSGVGPNTMAAGGGAPMADNNEGADGVGSSSGNWHCDSTWLGDRVITTSTRTWALPTYNNHLYRQISNGTSGGSTNDNTYFGYSTPWGYFDFNRFHCHFSPRDWQRLINNNWGFRPKRLNFKLFNIQVKEVTQNEGTRTIANNLTSTIQVFTDSEYQLPYVLGSAHQGCLPPFPADVFMIPQYGYLTLNNGSQAVGRSSFYCLEYFPSQMLRTGNNFEFSYNFEDVPFHSSYAHSQSLDRLMNPLIDQYLYYLSRTQSTGGTAGTQQLLFSQAGPNNMSAQAKNWLPGPCYRQQRVSTTLSQNNNSNFAWTGATKYHLNGRDSLVNPGVAMATHRDDEERFFPSSGVLMFGKQGAGRDNVDYSSVMLTSEEEIRTTNPVATEQYGVVADNLQQQNAAPIVGAVNSQGALPGMVWQNRDVYLQGPIWAKIPHTDGNFHPSPLMGGFGLKHPPPQILIKNTPVPADPPTTFNQAKLASFITQYSTGQVSVEIEWELQKENSKRWNPEIQYTSNYYKSTNVDFAVNTEGTYSEPRPIGTRYLTRNL

SEQ ID NO: 3278 - protein, 738 aa, Artificial Sequence
  Synthetic polypeptide
MAADGYLPDWLEDNLSEGIREWWDLKPGAPKPKANQQRQDNGRGLVLPGYRYLGPFNGLDKGEPVNAADAAALEHDRAYDQQLQAGDNPYLRYNHADAEFQERLQEDTSFGGNLGRAVFQAKKRVLEPLGLVESPVRTAPGKKRPVEPSPQRSPDSSTGIGKRGQQPAKKRLNFGQTGDSESVPDPQPIGEPPAAPSGVGPNTMAAGGGAPMADNNEGADGVGSSSGNWHCDSTWLGDRVITTSTRTWALPTYNNHLYRQISNGTSGGSTNDNTYFGYSTPWGYFDFNRFHCHFSPRDWQRLINNNWGFRPKRLNFKLFNIQVKEVTQNEGTRTIANNLTSTIQVFTDSEYQLPYVLGSAHQGCLPPFPADVFMIPQYGYLTLNNGSQAVGRSSFYCLEYFPSQMLRTGNNFEFSYNFEDVPFHSSYAHSQSLDRLMNPLIDQYLYYLSRTQSTGGTAGTQQLLFSQAGPNNMSAQAKNWLPGPCYRQQRVSTTLSQNNNSNFAWTGATKYHLNGRDSLVNPGVAMATHRDDEERFFPSSGVLMFGRQGAGRDNVDYSSVMLTSEEEIRTTNPVATEQYGVVADNLQQQNAAPIVGAVNSQGALPGMVWQNRDVYLQGPIWAKIPHTDGNFHPSPLMGGFGLKHPPPQILIKNTPVPADPPTTFNQAKLASFITQYSTGQVSVEIEWELQKENSKRWNPEIQYTSNYYKSTNVDFAVNTEGTYSEPRPIGTRYLTRNL

SEQ ID NO: 3279 - protein, 738 aa, Artificial Sequence
  Synthetic polypeptide
MAADGYLPDWLEDNLSEGIREWWDLKPGAPKPKANQQRQDNGRGLVLPGYRYLGPFNGLDKGEPVNAADAAALEHDRAYDQQLQAGDNPYLRYNHADAEFQERLQEDTSFGGNLGRAVFQAKKRVLEPLGLVESPVRTAPGKKRPVEPSPQRSPDSSTGIGKRGQQPAKKRLNFGQTGDSESVPDPQPIGEPPAAPSGVGPNTMAAGGGAPMADNNEGADGVGSSSGNWHCDSTWLGDRVITTSTRTWALPTYNNHLYRQISNGTSGGSTNDNTYFGYSTPWGYFDFNRFHCHFSPRDWQRLINNNWGFRPKRLNFKLFNIQVKEVTQNEGTRTIANNLTSTIQVFTDSEYQLPYVLGSAHQGCLPPFPADVFMIPQYGYLTLNNGSQAVGRSSFYCLEYFPSQMLRTGNNFEFSYNFEDVPFHSSYAHSQSLDRLMNPLIDQYLYYLSRTQSTGGTAGTQQLLFSQAGPNNMSAQAKNWLPGPCYRQQRVSTTLSQNNNSNFAWTGATKYHLNGRDSLVNPGVAMATHRDDEERFFPSSGVLMFGKQGAGRDNVDYSSVMLTSEEEIRTTNPVATEQYGVVADNLQQQNAAPIVGAVNSQGALPGMVWQNRDVYLQGPIWAKIPHTDGNFHPSPLMGGFGLKHPPPQILIKNTPVPADPPTTFNQARLASFITQYSTGQVSVEIEWELQKENSKRWNPEIQYTSNYYKSTNVDFAVNTEGTYSEPRPIGTRYLTRNL

SEQ ID NO: 3280 - protein, 738 aa, Artificial Sequence
  Synthetic polypeptide
MAADGYLPDWLEDNLSEGIREWWDLKPGAPKPKANQQRQDNGRGLVLPGYRYLGPFNGLDKGEPVNAADAAALEHDRAYDQQLQAGDNPYLRYNHADAEFQERLQEDTSFGGNLGRAVFQAKKRVLEPLGLVESPVRTAPGKKRPVEPSPQRSPDSSTGIGKKGQQPAKKRLNFGQTGDSESVPDPQPIGEPPAAPSGVGPNTMAAGGGAPMADNNEGADGVGSSSGNWHCDSTWLGDRVITTSTRTWALPTYNNHLYRQISNGTSGGSTNDNTYFGYSTPWGYFDFNRFHCHFSPRDWQRLINNNWGFRPKRLNFKLFNIQVKEVTQNEGTRTIANNLTSTIQVFTDSEYQLPYVLGSAHQGCLPPFPADVFMIPQYGYLTLNNGSQAVGRSSFYCLEYFPSQMLRTGNNFEFSYNFEDVPFHSSYAHSQSLDRLMNPLIDQYLYYLSRTQSTGGTAGTQQLLFSQAGPNNMSAQAKNWLPGPCYRQQRVSTTLSQNNNSNFAWTGATKYHLNGRDSLVNPGVAMATHRDDEERFFPSSGVLMFGRQGAGRDNVDYSSVMLTSEEEIRTTNPVATEQYGVVADNLQQQNAAPIVGAVNSQGALPGMVWQNRDVYLQGPIWAKIPHTDGNFHPSPLMGGFGLKHPPPQILIKNTPVPADPPTTFNQARLASFITQYSTGQVSVEIEWELQKENSKRWNPEIQYTSNYYKSTNVDFAVNTEGTYSEPRPIGTRYLTRNL

SEQ ID NO: 3281 - DNA, 2214 bp, Artificial Sequence
  Synthetic polynucleotide
atggctgccgatggttatcttccagattggctcgaggacaacctctctgagggcattcgcgagtggtgggacctgaaacctggagccccgaaacccaaagccaaccagcaaaagcaggacaacggccggggtctggtgcttcctggctacaagtacctcggacccttcaacggactcgacaagggggagcccgtcaacgcggcggacgcagcggccctcgagcacgacaaggcctacgaccagcagctccaagcgggtgacaatccgtacctgcggtataatcacgccgacgccgagtttcaggagcgtctgcaagaagatacgtcttttgggggcaacctcgggcgcgcagtcttccaggccaaaaagcgggttctcgaacctctgggcctggttgaatcgccggttaagacggctcctggaaagaagagaccggtagagccatcaccccagcgctctccagactcctctacgggcatcggcaagaaaggccagcagcccgcaaaaaagagactcaattttgggcagactggcgactcagagtcagtccccgaccctcaaccaatcggagaaccaccagcagccccctctggtgtgggacctaatacaatggctgcaggcggtggcgctccaatggcagacaataacgaaggcgccgacggagtgggtagttcctcaggaaattggcattgcgattccacatggctgggcgacagagtcatcaccaccagcacccgcacctgggccctgcccacctacaacaaccacctctacaagcaaatctccaacgggacctcgggaggaagcaccaacgacaacacctacttcggctacagcaccccctgggggtattttgacttcaacagattccactgccacttttcaccacgtgactggcagcgactcatcaacaacaactggggattccggcccaagaggctcaacttcaagctcttcaacatccaagtcaaggaggtcacgcagaatgaaggcaccaagaccatcgccaataaccttaccagcacgattcaggtctttacggactcggaataccagctcccgtacgtgctcggctcggcgcaccagggctgcctgcctccgttcccggcggacgtcttcatgattcctcagtacgggtacctgactctgaacaatggcagtcaggctgtgggccggtcgtccttctactgcctggagtactttccttctcaaatgctgagaacgggcaacaactttgaattcagctacaacttcgaggacgtgcccttccacagcagctacgcgcacagccagagcctggaccggctgatgaaccctctcatcgaccagtacttgtactacctgtcccggactcaaagcacgggcggtactgcaggaactcagcagttgctattttctcaggccgggcctaacaacatgtcggctcaggccaagaactggctacccggtccctgctaccggcagcaacgcgtctccacgacactgtcgcagaacaacaacagcaactttgcctggacgggtgccaccaagtatcatctgaatggcagagactctctggtgaatcctggcgttgccatggctacccacaaggacgacgaagagcgattttttccatccagcggagtcttaatgtttgggaaacagggagctggaaaagacaacgtggactatagcagcgtgatgctaaccagcgaggaagaaataaagaccaccaacccagtggccacagaacagtacggcgtggtggccgataacctgcaacagcaaaacgccgctcctattgtaggggccgtcaatagtcaaggagccttacctggcatggtgtggcagaaccgggacgtgtacctgcagggtcccatctgggccaagattcctcatacggacggcaactttcatccctcgccgctgatgggaggctttggactgaagcatccgcctcctcagatcctgattaaaaacacacctgttcccgcggatcctccgaccaccttcaatcaggccaagctggcttctttcatcacgcagtacagtaccggccaggtcagcgtggagatcgagtgggagctgcagaaggagaacagcaaacgctggaacccagagattcagtacacttccaactactacaaatctacaaatgtggactttgctgtcaatactgagggtacttattccgagcctcgccccattggcacccgttacctcacccgtaatctg

SEQ ID NO: 3282 - DNA, 2217 bp, Artificial Sequence
  Synthetic polynucleotide
atggctgccgatggttatcttccagattggctcgaggacaacctctctgagggcattcgcgagtggtgggacctgaaacctggagccccgaaacccaaagccaaccagcaaaggcaggacaacggccggggtctggtgcttcctggctacaggtacctcggacccttcaacggactcgacaagggggagcccgtcaacgcggcggacgcagcggccctcgagcacgacagggcctacgaccagcagctccaagcgggtgacaatccgtacctgcggtataatcacgccgacgccgagtttcaggagcgtctgcaagaagatacgtcttttgggggcaacctcgggcgcgcagtcttccaggccaaaaagcgggttctcgaacctctgggcctggttgaatcgccggttaggacggctcctggaaagaagagaccggtagagccatcaccccagcgctctccagactcctctacgggcatcggcaagaaaggccagcagcccgcaagaaagagactcaattttgggcagactggcgactcagagtcagtccccgaccctcaaccaatcggagaaccaccagcagccccctctggtgtgggacctaatacaatggctgcaggcggtggcgctccaatggcagacaataacgaaggcgccgacggagtgggtagttcctcaggaaattggcattgcgattccacatggctgggcgacagagtcatcaccaccagcacccgcacctgggccctgcccacctacaacaaccacctctacaggcaaatctccaacgggacctcgggaggaagcaccaacgacaacacctacttcggctacagcaccccctgggggtattttgacttcaacagattccactgccacttttcaccacgtgactggcagcgactcatcaacaacaactggggattccggcccaagaggctcaacttcaagctcttcaacatccaagtcaaggaggtcacgcagaatgaaggcaccaggaccatcgccaataaccttaccagcacgattcaggtctttacggactcggaataccagctcccgtacgtgctcggctcggcgcaccagggctgcctgcctccgttcccggcggacgtcttcatgattcctcagtacgggtacctgactctgaacaatggcagtcaggctgtgggccggtcgtccttctactgcctggagtactttccttctcaaatgctgagaacgggcaacaactttgaattcagctacaacttcgaggacgtgcccttccacagcagctacgcgcacagccagagcctggaccggctgatgaaccctctcatcgaccagtacttgtactacctgtcccggactcaaagcacgggcggtactgcaggaactcagcagttgctattttctcaggccgggcctaacaacatgtcggctcaggccaagaactggctacccggtccctgctaccggcagcaacgcgtctccacgacactgtcgcagaacaacaacagcaactttgcctggacgggtgccaccaagtatcatctgaatggcagagactctctggtgaatcctggcgttgccatggctacccacagggacgacgaagagcgattttttccatccagcggagtcttaatgtttgggagacagggagctggaagagacaacgtggactatagcagcgtgatgctaaccagcgaggaagaaataaggaccaccaacccagtggccacagaacagtacggcgtggtggccgataacctgcaacagcaaaacgccgctcctattgtaggggccgtcaatagtcaaggagccttacctggcatggtgtggcagaaccgggacgtgtacctgcagggtcccatctgggccaagattcctcatacggacggcaactttcatccctcgccgctgatgggaggctttggactgaagcatccgcctcctcagatcctgattaaaaacacacctgttcccgcggatcctccgaccaccttcaatcaggccaagctggcttctttcatcacgcagtacagtaccggccaggtcagcgtggagatcgagtgggagctgcagaaggagaacagcaaacgctggaacccagagattcagtacacttccaactactacaaatctacaaatgtggactttgctgtcaatactgagggtacttattccgagcctcgccccattggcacccgttacctcacccgtaatctgtaa

SEQ ID NO: 3283 - DNA, 2217 bp, Artificial Sequence
  Synthetic polynucleotide
atggctgccgatggttatcttccagattggctcgaggacaacctctctgagggcattcgcgagtggtgggacctgaaacctggagccccgaaacccaaagccaaccagcaaaggcaggacaacggccggggtctggtgcttcctggctacaggtacctcggacccttcaacggactcgacaagggggagcccgtcaacgcggcggacgcagcggccctcgagcacgacagggcctacgaccagcagctccaagcgggtgacaatccgtacctgcggtataatcacgccgacgccgagtttcaggagcgtctgcaagaagatacgtcttttgggggcaacctcgggcgcgcagtcttccaggccaaaaagcgggttctcgaacctctgggcctggttgaatcgccggttaggacggctcctggaaagaagagaccggtagagccatcaccccagcgctctccagactcctctacgggcatcggcaagagaggccagcagcccgcaagaaagagactcaattttgggcagactggcgactcagagtcagtccccgaccctcaaccaatcggagaaccaccagcagccccctctggtgtgggacctaatacaatggctgcaggcggtggcgctccaatggcagacaataacgaaggcgccgacggagtgggtagttcctcaggaaattggcattgcgattccacatggctgggcgacagagtcatcaccaccagcacccgcacctgggccctgcccacctacaacaaccacctctacaggcaaatctccaacgggacctcgggaggaagcaccaacgacaacacctacttcggctacagcaccccctgggggtattttgacttcaacagattccactgccacttttcaccacgtgactggcagcgactcatcaacaacaactggggattccggcccaagaggctcaacttcaagctcttcaacatccaagtcaaggaggtcacgcagaatgaaggcaccaggaccatcgccaataaccttaccagcacgattcaggtctttacggactcggaataccagctcccgtacgtgctcggctcggcgcaccagggctgcctgcctccgttcccggcggacgtcttcatgattcctcagtacgggtacctgactctgaacaatggcagtcaggctgtgggccggtcgtccttctactgcctggagtactttccttctcaaatgctgagaacgggcaacaactttgaattcagctacaacttcgaggacgtgcccttccacagcagctacgcgcacagccagagcctggaccggctgatgaaccctctcatcgaccagtacttgtactacctgtcccggactcaaagcacgggcggtactgcaggaactcagcagttgctattttctcaggccgggcctaacaacatgtcggctcaggccaagaactggctacccggtccctgctaccggcagcaacgcgtctccacgacactgtcgcagaacaacaacagcaactttgcctggacgggtgccaccaagtatcatctgaatggcagagactctctggtgaatcctggcgttgccatggctacccacagggacgacgaagagcgattttttccatccagcggagtcttaatgtttgggaaacagggagctggaagagacaacgtggactatagcagcgtgatgctaaccagcgaggaagaaataaggaccaccaacccagtggccacagaacagtacggcgtggtggccgataacctgcaacagcaaaacgccgctcctattgtaggggccgtcaatagtcaaggagccttacctggcatggtgtggcagaaccgggacgtgtacctgcagggtcccatctgggccaagattcctcatacggacggcaactttcatccctcgccgctgatgggaggctttggactgaagcatccgcctcctcagatcctgattaaaaacacacctgttcccgcggatcctccgaccaccttcaatcaggccaagctggcttctttcatcacgcagtacagtaccggccaggtcagcgtggagatcgagtgggagctgcagaaggagaacagcaaacgctggaacccagagattcagtacacttccaactactacaaatctacaaatgtggactttgctgtcaatactgagggtacttattccgagcctcgccccattggcacccgttacctcacccgtaatctgtaa

SEQ ID NO: 3284 - DNA, 2217 bp, Artificial Sequence
  Synthetic polynucleotide
atggctgccgatggttatcttccagattggctcgaggacaacctctctgagggcattcgcgagtggtgggacctgaaacctggagccccgaaacccaaagccaaccagcaaaggcaggacaacggccggggtctggtgcttcctggctacaggtacctcggacccttcaacggactcgacaagggggagcccgtcaacgcggcggacgcagcggccctcgagcacgacagggcctacgaccagcagctccaagcgggtgacaatccgtacctgcggtataatcacgccgacgccgagtttcaggagcgtctgcaagaagatacgtcttttgggggcaacctcgggcgcgcagtcttccaggccaaaaagcgggttctcgaacctctgggcctggttgaatcgccggttaggacggctcctggaaagaagagaccggtagagccatcaccccagcgctctccagactcctctacgggcatcggcaagagaggccagcagcccgcaaaaaagagactcaattttgggcagactggcgactcagagtcagtccccgaccctcaaccaatcggagaaccaccagcagccccctctggtgtgggacctaatacaatggctgcaggcggtggcgctccaatggcagacaataacgaaggcgccgacggagtgggtagttcctcaggaaattggcattgcgattccacatggctgggcgacagagtcatcaccaccagcacccgcacctgggccctgcccacctacaacaaccacctctacaggcaaatctccaacgggacctcgggaggaagcaccaacgacaacacctacttcggctacagcaccccctgggggtattttgacttcaacagattccactgccacttttcaccacgtgactggcagcgactcatcaacaacaactggggattccggcccaagaggctcaacttcaagctcttcaacatccaagtcaaggaggtcacgcagaatgaaggcaccaggaccatcgccaataaccttaccagcacgattcaggtctttacggactcggaataccagctcccgtacgtgctcggctcggcgcaccagggctgcctgcctccgttcccggcggacgtcttcatgattcctcagtacgggtacctgactctgaacaatggcagtcaggctgtgggccggtcgtccttctactgcctggagtactttccttctcaaatgctgagaacgggcaacaactttgaattcagctacaacttcgaggacgtgcccttccacagcagctacgcgcacagccagagcctggaccggctgatgaaccctctcatcgaccagtacttgtactacctgtcccggactcaaagcacgggcggtactgcaggaactcagcagttgctattttctcaggccgggcctaacaacatgtcggctcaggccaagaactggctacccggtccctgctaccggcagcaacgcgtctccacgacactgtcgcagaacaacaacagcaactttgcctggacgggtgccaccaagtatcatctgaatggcagagactctctggtgaatcctggcgttgccatggctacccacagggacgacgaagagcgattttttccatccagcggagtcttaatgtttgggagacagggagctggaagagacaacgtggactatagcagcgtgatgctaaccagcgaggaagaaataaggaccaccaacccagtggccacagaacagtacggcgtggtggccgataacctgcaacagcaaaacgccgctcctattgtaggggccgtcaatagtcaaggagccttacctggcatggtgtggcagaaccgggacgtgtacctgcagggtcccatctgggccaagattcctcatacggacggcaactttcatccctcgccgctgatgggaggctttggactgaagcatccgcctcctcagatcctgattaaaaacacacctgttcccgcggatcctccgaccaccttcaatcaggccaagctggcttctttcatcacgcagtacagtaccggccaggtcagcgtggagatcgagtgggagctgcagaaggagaacagcaaacgctggaacccagagattcagtacacttccaactactacaaatctacaaatgtggactttgctgtcaatactgagggtacttattccgagcctcgccccattggcacccgttacctcacccgtaatctgtaa

SEQ ID NO: 3285 - DNA, 2217 bp, Artificial Sequence
  Synthetic polynucleotide
atggctgccgatggttatcttccagattggctcgaggacaacctctctgagggcattcgcgagtggtgggacctgaaacctggagccccgaaacccaaagccaaccagcaaaggcaggacaacggccggggtctggtgcttcctggctacaggtacctcggacccttcaacggactcgacaagggggagcccgtcaacgcggcggacgcagcggccctcgagcacgacagggcctacgaccagcagctccaagcgggtgacaatccgtacctgcggtataatcacgccgacgccgagtttcaggagcgtctgcaagaagatacgtcttttgggggcaacctcgggcgcgcagtcttccaggccaaaaagcgggttctcgaacctctgggcctggttgaatcgccggttaggacggctcctggaaagaagagaccggtagagccatcaccccagcgctctccagactcctctacgggcatcggcaagagaggccagcagcccgcaaaaaagagactcaattttgggcagactggcgactcagagtcagtccccgaccctcaaccaatcggagaaccaccagcagccccctctggtgtgggacctaatacaatggctgcaggcggtggcgctccaatggcagacaataacgaaggcgccgacggagtgggtagttcctcaggaaattggcattgcgattccacatggctgggcgacagagtcatcaccaccagcacccgcacctgggccctgcccacctacaacaaccacctctacaggcaaatctccaacgggacctcgggaggaagcaccaacgacaacacctacttcggctacagcaccccctgggggtattttgacttcaacagattccactgccacttttcaccacgtgactggcagcgactcatcaacaacaactggggattccggcccaagaggctcaacttcaagctcttcaacatccaagtcaaggaggtcacgcagaatgaaggcaccaggaccatcgccaataaccttaccagcacgattcaggtctttacggactcggaataccagctcccgtacgtgctcggctcggcgcaccagggctgcctgcctccgttcccggcggacgtcttcatgattcctcagtacgggtacctgactctgaacaatggcagtcaggctgtgggccggtcgtccttctactgcctggagtactttccttctcaaatgctgagaacgggcaacaactttgaattcagctacaacttcgaggacgtgcccttccacagcagctacgcgcacagccagagcctggaccggctgatgaaccctctcatcgaccagtacttgtactacctgtcccggactcaaagcacgggcggtactgcaggaactcagcagttgctattttctcaggccgggcctaacaacatgtcggctcaggccaagaactggctacccggtccctgctaccggcagcaacgcgtctccacgacactgtcgcagaacaacaacagcaactttgcctggacgggtgccaccaagtatcatctgaatggcagagactctctggtgaatcctggcgttgccatggctacccacagggacgacgaagagcgattttttccatccagcggagtcttaatgtttgggaaacagggagctggaagagacaacgtggactatagcagcgtgatgctaaccagcgaggaagaaataaggaccaccaacccagtggccacagaacagtacggcgtggtggccgataacctgcaacagcaaaacgccgctcctattgtaggggccgtcaatagtcaaggagccttacctggcatggtgtggcagaaccgggacgtgtacctgcagggtcccatctgggccaagattcctcatacggacggcaactttcatccctcgccgctgatgggaggctttggactgaagcatccgcctcctcagatcctgattaaaaacacacctgttcccgcggatcctccgaccaccttcaatcaggccaggctggcttctttcatcacgcagtacagtaccggccaggtcagcgtggagatcgagtgggagctgcagaaggagaacagcaaacgctggaacccagagattcagtacacttccaactactacaaatctacaaatgtggactttgctgtcaatactgagggtacttattccgagcctcgccccattggcacccgttacctcacccgtaatctgtaa

SEQ ID NO: 3286 - DNA, 2217 bp, Artificial Sequence
  Synthetic polynucleotide
atggctgccgatggttatcttccagattggctcgaggacaacctctctgagggcattcgcgagtggtgggacctgaaacctggagccccgaaacccaaagccaaccagcaaaggcaggacaacggccggggtctggtgcttcctggctacaggtacctcggacccttcaacggactcgacaagggggagcccgtcaacgcggcggacgcagcggccctcgagcacgacagggcctacgaccagcagctccaagcgggtgacaatccgtacctgcggtataatcacgccgacgccgagtttcaggagcgtctgcaagaagatacgtcttttgggggcaacctcgggcgcgcagtcttccaggccaaaaagcgggttctcgaacctctgggcctggttgaatcgccggttaggacggctcctggaaagaagagaccggtagagccatcaccccagcgctctccagactcctctacgggcatcggcaagaaaggccagcagcccgcaaaaaagagactcaattttgggcagactggcgactcagagtcagtccccgaccctcaaccaatcggagaaccaccagcagccccctctggtgtgggacctaatacaatggctgcaggcggtggcgctccaatggcagacaataacgaaggcgccgacggagtgggtagttcctcaggaaattggcattgcgattccacatggctgggcgacagagtcatcaccaccagcacccgcacctgggccctgcccacctacaacaaccacctctacaggcaaatctccaacgggacctcgggaggaagcaccaacgacaacacctacttcggctacagcaccccctgggggtattttgacttcaacagattccactgccacttttcaccacgtgactggcagcgactcatcaacaacaactggggattccggcccaagaggctcaacttcaagctcttcaacatccaagtcaaggaggtcacgcagaatgaaggcaccaggaccatcgccaataaccttaccagcacgattcaggtctttacggactcggaataccagctcccgtacgtgctcggctcggcgcaccagggctgcctgcctccgttcccggcggacgtcttcatgattcctcagtacgggtacctgactctgaacaatggcagtcaggctgtgggccggtcgtccttctactgcctggagtactttccttctcaaatgctgagaacgggcaacaactttgaattcagctacaacttcgaggacgtgcccttccacagcagctacgcgcacagccagagcctggaccggctgatgaaccctctcatcgaccagtacttgtactacctgtcccggactcaaagcacgggcggtactgcaggaactcagcagttgctattttctcaggccgggcctaacaacatgtcggctcaggccaagaactggctacccggtccctgctaccggcagcaacgcgtctccacgacactgtcgcagaacaacaacagcaactttgcctggacgggtgccaccaagtatcatctgaatggcagagactctctggtgaatcctggcgttgccatggctacccacagggacgacgaagagcgattttttccatccagcggagtcttaatgtttgggagacagggagctggaagagacaacgtggactatagcagcgtgatgctaaccagcgaggaagaaataaggaccaccaacccagtggccacagaacagtacggcgtggtggccgataacctgcaacagcaaaacgccgctcctattgtaggggccgtcaatagtcaaggagccttacctggcatggtgtggcagaaccgggacgtgtacctgcagggtcccatctgggccaagattcctcatacggacggcaactttcatccctcgccgctgatgggaggctttggactgaagcatccgcctcctcagatcctgattaaaaacacacctgttcccgcggatcctccgaccaccttcaatcaggccaggctggcttctttcatcacgcagtacagtaccggccaggtcagcgtggagatcgagtgggagctgcagaaggagaacagcaaacgctggaacccagagattcagtacacttccaactactacaaatctacaaatgtggactttgctgtcaatactgagggtacttattccgagcctcgccccattggcacccgttacctcacccgtaatctgtaa

SEQ ID NO: 3287 - protein, 744 aa, Artificial Sequence
  Synthetic polypeptide
MAADGYLPDWLEDTLSEGIRQWWKLKPGPPPPKPAERHKDDSRGLVLPGYKYLGPFNGLDKGEPVNEADAAALEHDKAYDRQLDSGDNPYLKYNHADAEFQERLKEDTSFGGNLGRAVFQAKKRVLEPLGLVEEPVKTAPGKKRPVEHSPVEPDSSSGTGKAGQQPARKRLNFGQTGDADSVPDPQPLGQPPAAPSGLGTNTMATGSGAPMADNNEGADGVGNSSGNWHCDSTWMGDRVITTSTRTWALPTYNNHLYKQISSQSGASNDNHYFGYSTPWGYFDFNRFHCHFSPRDWQRLINNNWGFRPKRLNFKLFNIQVKEVTQNDGTTTIANNLTSTVQVFTDSEYQLPYVLGSAHQGCLPPFPADVFMVPQYGYLTLNNGSQAVGRSSFYCLEYFPSQMLRTGNNFTFSYTFEDVPFHSSYAHSQSLDRLMNPLIDQYLYYLSRTNTPSGTTTQSRLQFSQAGASDIRDQSRNWLPGPCYRQQRVSKTSADNNNSEYSWTGATKYHLNGRDSLVNPGPAMASHKDDEEKFFPQSGVLIFGKQGSEKTNVDIEKVMITDEEEIRTTNPVATEQYGSVSTNLQRGQRGESGHGYFAQAATADVNTQGVLPGMVWQDRDVYLQGPIWAKIPHTDGHFHPSPLMGGFGLKHPPPQILIKNTPVPANPSTTFSAAKFASFITQYSTGQVSVEIEWELQKENSKRWNPEIQYTSNYNKSVNVDFTVDTNGVYSEPRPIGTRYLTRNL

SEQ ID NO: 3288 - DNA, 8359 bp, Artificial Sequence
  Synthetic polynucleotide
catcatcaataatataccttattttggattgaagccaatatgataatgagggggtggagtttgtgacgtggcgcggggcgtgggaacggggcgggtgacgtagtagctctagaggtcctgtattagaggtcacgtgagtgttttgcgacattttgcgacaccatgtggtcacgctgggtatttaagcccgagtgagcacgcagggtctccattttgaagcgggaggtttgaacgcgcagccgccatgccggggttttacgagattgtgattaaggtccccagcgaccttgacgagcatctgcccggcatttctgacagctttgtgaactgggtggccgagaaggaatgggagttgccgccagattctgacatggatctgaatctgattgagcaggcacccctgaccgtggccgagaagctgcagcgcgactttctgacggaatggcgccgtgtgagtaaggcaccggaggcccttttctttgtgcaatttgagaagggagagagctacttccacatgcacgtgctcgtggaaaccaccggggtgaaatccatggttttgggacgtttcctgagtcagattcgcgaaaaactgattcagagaatttaccgcgggatcgagccgactttgccaaactggttcgcggtcacaaagaccagaaatggcgccggaggcgggaacaaggtggtggatgagtgctacatccccaattacttgctccccaaaacccagcctgagctccagtgggcgtggactaatatggaacagtatttaagcgcctgtttgaatctcacggagcgtaaacggttggtggcgcagcatctgacgcacgtgtcgcagacgcaggagcagaacaaagagaatcagaatcccaattctgatgcgccggtgatcagatcaaaaacttcagccaggtacatggagctggtcgggtggctcgtggacaaggggattacctcggagaagcagtggatccaggaggaccaggcctcatacatctccttcaatgcggcctccaactcgcggtcccaaatcaaggctgccttggacaatgcgggaaagattatgagcctgactaaaaccgcccccgactacctggtgggccagcagcccgtggaggacatttccagcaatcggatttataaaattttggaactaaacgggtacgatccccaatatgcggcttccgtctttctgggatgggccacgaaaaagttcggcaagaggaacaccatctggctgtttgggcctgcaactaccgggaagaccaacatcgcggaggccatagcccacactgtgcccttctacgggtgcgtaaactggaccaatgagaactttcccttcaacgactgtgtcgacaagatggtgatctggtgggaggaggggaagatgaccgccaaggtcgtggagtcggccaaagccattctcggaggaagcaaggtgcgcgtggaccagaaatgcaagtcctcggcccagatagacccgactcccgtgatcgtcacctccaacaccaacatgtgcgccgtgattgacgggaactcaacgaccttcgaacaccagcagccgttgcaagaccggatgttcaaatttgaactcacccgccgtctggatcatgactttgggaaggtcaccaagcaggaagtcaaagactttttccggtgggcaaaggatcacgtggttgaggtggagcatgaattctacgtcaaaaagggtggagccaagaaaagacccgcccccagtgacgcagatataagtgagcccaaacgggtgcgcgagtcagttgcgcagccatcgacgtcagacgcggaagcttcgatcaactacgcagacaggtaccaaaacaaatgttctcgtcacgtgggcatgaatctgatgctgtttccctgcagacaatgcgagagaatgaatcagaattcaaatatctgcttcactcacggacagaaagactgtttagagtgctttcccgtgtcagaatctcaacccgtttctgtcgtcaaaaaggcgtatcagaaactgtgctacattcatcatatcatgggaaaggtgccagacgcttgcactgcctgcgatctggtcaatgtggatttggatgactgcatctttgaacaataaatgatttaaatcaggtatggctgccgatggttatcttccagattggctcgaggacactctctctgaaggaataagacagtggtggaagctcaaacctggcccaccaccaccaaagcccgcagagcggcataaggacgacagcaggggtcttgtgcttcctgggtacaagtacctcggacccttcaacggactcgacaagggagagccggtcaacgaggcagacgccgcggccctcgagcacgacaaagcctacgaccggcagctcgacagcggagacaacccgtacctcaagtacaaccacgccgacgcggagtttcaggagcgccttaaagaagatacgtcttttgggggcaacctcggacgagcagtcttccaggcgaaaaagagggttcttgaacctctgggcctggttgaggaacctgttaagacggctccgggaaaaaagaggccggtagagcactctcctgtggagccagactcctcctcgggaaccggaaaggcgggccagcagcctgcaagaaaaagattgaattttggtcagactggagacgcagactcagtacctgacccccagcctctcggacagccaccagcagccccctctggtctgggaactaatacgatggctacaggcagtggcgcaccaatggcagacaataacgagggcgccgacggagtgggtaattcctcgggaaattggcattgcgattccacatggatgggcgacagagtcatcaccaccagcacccgaacctgggccctgcccacctacaacaaccacctctacaaacaaatttccagccaatcaggagcctcgaacgacaatcactactttggctacagcaccccttgggggtattttgacttcaacagattccactgccacttttcaccacgtgactggcaaagactcatcaacaacaactggggattccgacccaagagactcaacttcaagctctttaacattcaagtcaaagaggtcacgcagaatgacggtacgacgacgattgccaataaccttaccagcacggttcaggtgtttactgactcggagtaccagctcccgtacgtcctcggctcggcgcatcaaggatgcctcccgccgttcccagcagacgtcttcatggtgccacagtatggatacctcaccctgaacaacgggagtcaggcagtaggacgctcttcattttactgcctggagtactttccttctcagatgctgcgtaccggaaacaactttaccttcagctacacttttgaggacgttcctttccacagcagctacgctcacagccagagtctggaccgtctcatgaatcctctcatcgaccagtacctgtattacttgagcagaacaaacactccaagtggaaccaccacgcagtcaaggcttcagttttctcaggccggagcgagtgacattcgggaccagtctaggaactggcttcctggaccctgttaccgccagcagcgagtatcaaagacatctgcggataacaacaacagtgaatactcgtggactggagctaccaagtaccacctcaatggcagagactctctggtgaatccgggcccggccatggcaagccacaaggacgatgaagaaaagttttttcctcagagcggggttctcatctttgggaagcaaggctcagagaaaacaaatgtggacattgaaaaggtcatgattacagacgaagaggaaatcaggacaaccaatcccgtggctacggagcagtatggttctgtatctaccaacctccagagaggccagagaggcgagtctggtcatggttattttgcccaggcggccaccgcagatgtcaacacacaaggcgttcttccaggcatggtctggcaggacagagatgtgtaccttcaggggcccatctgggcaaagattccacacacggacggacattttcacccctctcccctcatgggtggattcggacttaaacaccctcctccacagattctcatcaagaacaccccggtacctgcgaatccttcgaccaccttcagtgcggcaaagtttgcttccttcatcacacagtactccacgggacaggtcagcgtggagatcgagtgggagctgcagaaggaaaacagcaaacgctggaatcccgaaattcagtacacttccaactacaacaagtctgttaatgtggactttactgtggacactaatggcgtgtattcagagcctcgccccattggcaccagatacctgactcgtaatctgtaattgcttgttaatcaataaaccgtttaattcgtttcagttgaactttggtctctgcgtatttctttcttatctagtttccatgctctagaggtcctgtattagaggtcacgtgagtgttttgcgacattttgcgacaccatgtggtcacgctgggtatttaagcccgagtgagcacgcagggtctccattttgaagcgggaggtttgaacgcgcagccaccacggcggggttttacgagattgtgattaaggtccccagcgaccttgacgagcatctgcccggcatttctgacagctttgtgaactgggtggccgagaaggaatgggagttgccgccagattctgacatggatctgaatctgattgagcaggcacccctgaccgtggccgagaagctgcatcgctggcgtaatagcgaagaggcccgcaccgatcgcccttcccaacagttgcgcagcctgaatggcgaatggcgattccgttgcaatggctggcggtaatattgttctggatattaccagcaaggccgatagtttgagttcttctactcaggcaagtgatgttattactaatcaaagaagtattgcgacaacggttaatttgcgtgatggacagactcttttactcggtggcctcactgattataaaaacacttctcaggattctggcgtaccgttcctgtctaaaatccctttaatcggcctcctgtttagctcccgctctgattctaacgaggaaagcacgttatacgtgctcgtcaaagcaaccatagtacgcgccctgtagcggcgcattaagcgcggcgggtgtggtggttacgcgcagcgtgaccgctacacttgccagcgccctagcgcccgctcctttcgctttcttcccttcctttctcgccacgttcgccggctttccccgtcaagctctaaatcgggggctccctttagggttccgatttagtgctttacggcacctcgaccccaaaaaacttgattagggtgatggttcacgtagtgggccatcgccctgatagacggtttttcgccctttgacgttggagtccacgttctttaatagtggactcttgttccaaactggaacaacactcaaccctatctcggtctattcttttgatttataagggattttgccgatttcggcctattggttaaaaaatgagctgatttaacaaaaatttaacgcgaattttaacaaaatattaacgtttacaatttaaatatttgcttatacaatcttcctgtttttggggcttttctgattatcaaccggggtacatatgattgacatgctagttttacgattaccgttcatcgattctcttgtttgctccagactctcaggcaatgacctgatagcctttgtagagacctctcaaaaatagctaccctctccggcatgaatttatcagctagaacggttgaatatcatattgatggtgatttgactgtctccggcctttctcacccgtttgaatctttacctacacattactcaggcattgcatttaaaatatatgagggttctaaaaatttttatccttgcgttgaaataaaggcttctcccgcaaaagtattacagggtcataatgtttttggtacaaccgatttagctttatgctctgaggctttattgcttaattttgctaattctttgccttgcctgtatgatttattggatgttggaattcctgatgcggtattttctccttacgcatctgtgcggtatttcacaccgcatatggtgcactctcagtacaatctgctctgatgccgcatagttaagccagccccgacacccgccaacacccgctgacgcgccctgacgggcttgtctgctcccggcatccgcttacagacaagctgtgaccgtctccgggagctgcatgtgtcagaggttttcaccgtcatcaccgaaacgcgcgagacgaaagggcctcgtgatacgcctatttttataggttaatgtcatgataataatggtttcttagacgtcaggtggcacttttcggggaaatgtgcgcggaacccctatttgtttatttttctaaatacattcaaatatgtatccgctcatgagacaataaccctgataaatgcttcaataatattgaaaaaggaagagtatgagtattcaacatttccgtgtcgcccttattcccttttttgcggcattttgccttcctgtttttgctcacccagaaacgctggtgaaagtaaaagatgctgaagatcagttgggtgcacgagtgggttacatcgaactggatctcaacagcggtaagatccttgagagttttcgccccgaagaacgttttccaatgatgagcacttttaaagttctgctatgtggcgcggtattatcccgtattgacgccgggcaagagcaactcggtcgccgcatacactattctcagaatgacttggttgagtactcaccagtcacagaaaagcatcttacggatggcatgacagtaagagaattatgcagtgctgccataaccatgagtgataacactgcggccaacttacttctgacaacgatcggaggaccgaaggagctaaccgcttttttgcacaacatgggggatcatgtaactcgccttgatcgttgggaaccggagctgaatgaagccataccaaacgacgagcgtgacaccacgatgcctgtagcaatggcaacaacgttgcgcaaactattaactggcgaactacttactctagcttcccggcaacaattaatagactggatggaggcggataaagttgcaggaccacttctgcgctcggcccttccggctggctggtttattgctgataaatctggagccggtgagcgtgggtctcgcggtatcattgcagcactggggccagatggtaagccctcccgtatcgtagttatctacacgacggggagtcaggcaactatggatgaacgaaatagacagatcgctgagataggtgcctcactgattaagcattggtaactgtcagaccaagtttactcatatatactttagattgatttaaaacttcatttttaatttaaaaggatctaggtgaagatcctttttgataatctcatgaccaaaatcccttaacgtgagttttcgttccactgagcgtcagaccccgtagaaaagatcaaaggatcttcttgagatcctttttttctgcgcgtaatctgctgcttgcaaacaaaaaaaccaccgctaccagcggtggtttgtttgccggatcaagagctaccaactctttttccgaaggtaactggcttcagcagagcgcagataccaaatactgtccttctagtgtagccgtagttaggccaccacttcaagaactctgtagcaccgcctacatacctcgctctgctaatcctgttaccagtggctgctgccagtggcgataagtcgtgtcttaccgggttggactcaagacgatagttaccggataaggcgcagcggtcgggctgaacggggggttcgtgcacacagcccagcttggagcgaacgacctacaccgaactgagatacctacagcgtgagctatgagaaagcgccacgcttcccgaagggagaaaggcggacaggtatccggtaagcggcagggtcggaacaggagagcgcacgagggagcttccagggggaaacgcctggtatctttatagtcctgtcgggtttcgccacctctgacttgagcgtcgatttttgtgatgctcgtcaggggggcggagcctatggaaaaacgccagcaacgcggcctttttacggttcctggccttttgctggccttttgctcacatgttctttcctgcgttatcccctgattctgtggataaccgtattaccgcctttgagtgagctgataccgctcgccgcagccgaacgaccgagcgcagcgagtcagtgagcgaggaagcggaagagcgcccaatacgcaaaccgcctctccccgcgcgttggccgattcattaatgcagaattcc

SEQ ID NO: 3289 - protein, 736 aa, Artificial Sequence
  Synthetic polypeptide
MAADGYLPDWLEDNLSEGIREWWDLKPGAPKPKANQQKQDDGRGLVLPGYKYLGPFNGLDKGEPVNAADAAALEHDKAYDQQLKAGDNPYLRYNHADAEFQERLQEDTSFGGNLGRAVFQAKKRVLEPLGLVEEGAKTAPGKKRPVEQSPQEPDSSSGIGKKGQQPAKKRLNFGQTGDSESVPDPQPLGEPPAAPSGVGSNTMAAGGGAPMADNNEGADGVGNASGNWHCDSTWLGDRVITTSTRTWALPTYNNHLYKQISSQSGASTNDNTYFGYSTPWGYFDFNRFHCHFSPRDWQRLINNNWGFRPKRLNFKLFNIQVKEVTTNDGTTTIANNLTSTVQVFTDSEYQLPYVLGSAHQGCLPPFPADVFMIPQYGYLTLNNGSQAVGRSSFYCLEYFPSQMLRTGNNFEFSYTFEDVPFHSSYAHSQSLDRLMNPLIDQYLYYLSRTQTTSGTAGNRTLQFSQAGPSSMANQAKNWLPGPCYRQQRVSKTANQNNNSNFAWTGATKYHLNGRDSLVNPGPAMATHKDDEDKFFPMSGVLIFGKQGAGNSNVDLDNVMITSEEEIKTTNPVATEQYGTVATNLQSSNTAPATGTVNSQGALPGMVWQNRDVYLQGPIWAKIPHTDGHFHPSPLMGGFGLKHPPPQILIKNTPVPANPPTTFSPAKFASFITQYSTGQVSVEIEWELQKENSKRWNPEIQYTSNYNKSTNVDFAVDTNGVYSEPRPIGTRYLTRNL

SEQ ID NO: 3290 - DNA, 2208 bp, Artificial Sequence
  Synthetic polynucleotide
atggctgccgatggttatcttccagattggctcgaggacaacctctctgagggcattcgcgagtggtgggacttgaaacctggagccccgaaacccaaagccaaccagcaaaagcaggacgacggccggggtctggtgcttcctggctacaagtacctcggacccttcaacggactcgacaagggggagcccgtcaacgcggcggacgcagcggccctcgagcacgacaaggcctacgaccagcagctcaaagcgggtgacaatccgtacctgcggtataaccacgccgacgccgagtttcaggagcgtctgcaagaagatacgtcttttgggggcaacctcgggcgagcagtcttccaggccaagaagcgggttctcgaacctctcggtctggttgaggaaggcgctaagacggctcctggaaagaagagaccggtagagcaatcaccccaggaaccagactcctcttcgggcatcggcaagaaaggccagcagcccgcgaagaagagactcaactttgggcagacaggcgactcagagtcagtgcccgaccctcaaccactcggagaaccccccgcagccccctctggtgtgggatctaatacaatggcagcaggcggtggcgctccaatggcagacaataacgaaggcgccgacggagtgggtaacgcctcaggaaattggcattgcgattccacatggctgggcgacagagtcatcaccaccagcacccgaacctgggccctccccacctacaacaaccacctctacaagcaaatctccagccaatcgggagcaagcaccaacgacaacacctacttcggctacagcaccccctgggggtattttgactttaacagattccactgccacttctcaccacgtgactggcagcgactcatcaacaacaactggggattccggcccaagagactcaacttcaagctcttcaacatccaggtcaaggaggtcacgacgaatgatggcaccacgaccatcgccaataaccttaccagcacggttcaggtctttacggactcggaataccagctcccgtacgtcctcggctctgcgcaccagggctgcctgcctccgttcccggcggacgtcttcatgattcctcagtacgggtacctgactctgaacaatggcagtcaggccgtgggccgttcctccttctactgcctggagtactttccttctcaaatgctgagaacgggcaacaactttgagttcagctacacgtttgaggacgtgccttttcacagcagctacgcgcacagccaaagcctggaccggctgatgaaccccctcatcgaccagtacctgtactacctgtctcggactcagaccacgagtggtaccgcaggaaatcggacgttgcaattttctcaggccgggcctagtagcatggcgaatcaggccaaaaactggctacccgggccctgctaccggcagcaacgcgtctccaagacagcgaatcaaaataacaacagcaactttgcctggaccggtgccaccaagtatcatctgaatggcagagactctctggtaaatcccggtcccgctatggcaacccacaaggacgacgaagacaaattttttccgatgagcggagtcttaatatttgggaaacagggagctggaaatagcaacgtggaccttgacaacgttatgataaccagtgaggaagaaattaaaaccaccaacccagtggccacagaacagtacggcacggtggccactaacctgcaatcgtcaaacaccgctcctgctacagggaccgtcaacagtcaaggagccttacctggcatggtctggcagaaccgggacgtgtacctgcagggtcctatctgggccaagattcctcacacggacggacactttcatccctcgccgctgatgggaggctttggactgaaacacccgcctcctcagatcctgattaagaatacacctgttcccgcgaatcctccaactaccttcagtccagctaagtttgcgtcgttcatcacgcagtacagcaccggacaggtcagcgtggaaattgaatgggagctgcagaaagaaaacagcaaacgctggaacccagagattcaatacacttccaactacaacaaatctacaaatgtggactttgctgttgacacaaatggcgtttattctgagcctcgccccatcggcacccgttacctcacccgtaatctg

SEQ ID NO: 3291 - protein, 737 aa, Artificial Sequence
  Synthetic polypeptide
MAADGYLPDWLEDNLSEGIREWWDLKPGAPKPKANQQKQDDGRGLVLPGYKYLGPFNGLDKGEPVNAADAAALEHDKAYDQQLKAGDNPYLRYNHADAEFQERLQEDTSFGGNLGRAVFQAKKRVLEPLGLVEEGAKTAPGKKRPVEQSPQEPDSSTGIGKKGQQPAKKRLNFGQTGDSESVPDPQPLGEPPAAPSGVGSNTMAAGGGAPMADNNEGADGVGNASGNWHCDSTWLGDRVITTSTRTWALPTYNNHLYKQISNSQSGGSTNDNTYFGYSTPWGYFDFNRFHCHFSPRDWQRLINNNWGFRPKRLNFKLFNIQVKEVTTNDGTTTIANNLTSTVQVFTDSEYQLPYVLGSAHQGCLPPFPADVFMIPQYGYLTLNNGSQAVGRSSFYCLEYFPSQMLRTGNNFEFSYTFEDVPFHSSYAHSQSLDRLMNPLIDQYLYYLSRTQTTGGTAGNRTLQFSQAGPSSMANQAKNWLPGPCYRQQRVSKTTNQNNNSNFAWTGATKYHLNGRDSLVNPGVAMATHKDDEDRFFPSSGVLIFGKQGAGNDNVDLDNVMITSEEEIKTTNPVATEEYGVVATNLQSANTAPQTGTVNSQGALPGMVWQNRDVYLQGPIWAKIPHTDGNFHPSPLMGGFGLKHPPPQILIKNTPVPANPPTTFSPAKFASFITQYSTGQVSVEIEWELQKENSKRWNPEIQYTSNYNKSTNVDFAVDTEGVYSEPRPIGTRYLTRNL

SEQ ID NO: 3292 - DNA, 2211 bp, Artificial Sequence
  Synthetic polynucleotide
atggctgccgatggttatcttccagattggctcgaggacaacctctctgagggcattcgcgagtggtgggacttgaaacctggagccccgaaacccaaagccaaccagcaaaagcaggacgacggccggggtctggtgcttcctggctacaagtacctcggacccttcaacggactcgacaagggggagcccgtcaacgcggcggacgcagcggccctcgagcacgacaaggcctacgaccagcagctcaaagcgggtgacaatccgtacctgcggtataaccacgccgacgccgagtttcaggagcgtctgcaagaagatacgtcttttgggggcaacctcgggcgagcagtcttccaggccaagaagcgggttctcgaacctctcggtctggttgaggaaggcgctaagacggctcctggaaagaagagaccggtagagcaatcaccccaggaaccagactcctctacgggcatcggcaagaaaggccagcagcccgcgaaaaagagactcaactttgggcagactggcgactcagagtcagtgcccgaccctcaaccactcggagaaccccccgcagccccctctggtgtgggatctaatacaatggctgcaggcggtggcgctccaatggcagacaataacgaaggcgccgacggagtgggtaatgcctcaggaaattggcattgcgattccacatggctgggcgacagagtcatcaccaccagcacccgaacctgggccctccccacctacaacaaccacctctacaagcaaatctccaacagccaatcgggaggaagcaccaacgacaacacctacttcggctacagcaccccctgggggtattttgactttaacagattccactgccacttctcaccacgtgactggcagcgactcatcaacaacaactggggattccggcccaagagactcaacttcaagctcttcaacatccaggtcaaggaggtcacgacgaatgatggcaccacgaccatcgccaataaccttaccagcacggttcaggtctttacggactcggaataccagctcccgtacgtcctcggctctgcgcaccagggctgcctgcctccgttcccggcggacgtcttcatgattcctcagtacgggtacctgactctgaacaatggcagtcaggccgtgggccgttcctccttctactgcctggagtactttccttctcaaatgctgagaacgggcaacaactttgagttcagctacacgtttgaggacgtgccttttcacagcagctacgcgcacagccaaagcctggaccggctgatgaaccccctcatcgaccagtacctgtactacctgtctcggactcagaccacgggaggtaccgcaggaaatcggacgttgcaattttctcaggccgggcctagtagcatggcgaatcaggccaaaaactggctacccgggccctgctaccggcagcaacgcgtctccaagacaacgaatcaaaataacaacagcaactttgcctggaccggtgccaccaagtatcatctgaatggcagagactctctggtaaatcccggtgtcgctatggcaacccacaaggacgacgaagaccgattttttccgtccagcggagtcttaatatttgggaaacagggagctggaaatgacaacgtggaccttgacaacgttatgataaccagtgaggaagaaattaaaaccaccaacccagtggccacagaagagtacggcgtggtggccactaacctgcaatcggcaaacaccgctcctcaaacagggaccgtcaacagtcaaggagccttacctggcatggtctggcagaaccgggacgtgtacctgcagggtcctatctgggccaagattcctcacacggacggaaactttcatccctcgccgctgatgggaggctttggactgaaacacccgcctcctcagatcctgattaagaatacacctgttcccgcgaatcctccaactaccttcagtccagctaagtttgcgtcgttcatcacgcagtacagcaccggacaggtcagcgtggaaattgaatgggagctgcagaaagaaaacagcaaacgctggaacccagagattcaatacacttccaactacaacaaatctacaaatgtggactttgctgttgacacagaaggcgtttattctgagcctcgccccatcggcacccgttacctcacccgtaatctg

SEQ ID NO: 3293 - protein, 738 aa, Artificial Sequence
  Synthetic polypeptide
MAADGYLPDWLEDNLSEGIREWWDLKPGAPKPKANQQKQDDGRGLVLPGYKYLGPFNGLDKGEPVNAADAAALEHDKAYDQQLKAGDNPYLRYNHADAEFQERLQEDTSFGGNLGRAVFQAKKRVLEPLGLVEEGAKTAPGKKRPVEQSPQREPDSSTGIGKKGQQPAKKRLNFGQTGDSESVPDPQPLGEPPAAPSGVGSNTMAAGGGAPMADNNEGADGVGNSSGNWHCDSTWLGDRVITTSTRTWALPTYNNHLYKQISNGTSGGSTNDNTYFGYSTPWGYFDFNRFHCHFSPRDWQRLINNNWGFRPKRLNFKLFNIQVKEVTTNEGTKTIANNLTSTVQVFTDSEYQLPYVLGSAHQGCLPPFPADVFMIPQYGYLTLNNGSQAVGRSSFYCLEYFPSQMLRTGNNFQFSYTFEDVPFHSSYAHSQSLDRLMNPLIDQYLYYLSRTQTTGGTAGTQTLQFSQAGPSSMANQAKNWLPGPCYRQQRVSTTTNQNNNSNFAWTGATKYHLNGRDSLVNPGVAMATHKDDEDRFFPSSGVLIFGKQGAGNDNVDYSNVMITSEEEIKTTNPVATEEYGVVATNLQSANTAPQTGTVNSQGALPGMVWQNRDVYLQGPIWAKIPHTDGNFHPSPLMGGFGLKHPPPQILIKNTPVPADPPTTFNQAKLNSFITQYSTGQVSVEIEWELQKENSKRWNPEIQYTSNYYKSTNVDFAVNTEGVYSEPRPIGTRYLTRNL

SEQ ID NO: 3294 - DNA, 2214 bp, Artificial Sequence
  Synthetic polynucleotide
atggctgccgatggttatcttccagattggctcgaggacaacctctctgagggcattcgcgagtggtgggacctgaaacctggagccccgaaacccaaagccaaccagcaaaagcaggacgacggccggggtctggtgcttcctggctacaagtacctcggacccttcaacggactcgacaagggggagcccgtcaacgcggcggacgcagcggccctcgagcacgacaaggcctacgaccagcagctcaaagcgggtgacaatccgtacctgcggtataatcacgccgacgccgagtttcaggagcgtctgcaagaagatacgtcttttgggggcaacctcgggcgagcagtcttccaggccaagaagcgggttctcgaacctctcggtctggttgaggaaggcgctaagacggctcctggaaagaagagaccggtagagcagtcaccacagcgtgagcccgactcctccacgggcatcggcaagaaaggccagcagcccgccaaaaagagactcaatttcggtcagactggcgactcagagtcagtccccgaccctcaacctctcggagaacctccagcagcgccctctggtgtgggatctaatacaatggctgcaggcggtggcgcaccaatggcagacaataacgaaggtgccgacggagtgggtaattcctcgggaaattggcattgcgattccacatggctgggcgacagagtcatcaccaccagcacccgaacctgggccctgcccacctacaacaaccacctctacaagcaaatctccaacgggacctcgggaggcagcaccaacgacaacacctactttggctacagcaccccctgggggtattttgactttaacagattccactgccacttctcaccacgtgactggcagcgactcatcaacaacaactggggattccggcccaagagactcaacttcaagctcttcaacatccaggtcaaagaggtcacgacgaatgaaggcaccaagaccatcgccaataacctcaccagcaccgtccaggtgtttacggactcggaataccagctgccgtacgtcctcggctctgcccaccagggctgcctgcctccgttcccggcggacgtcttcatgattcctcagtacggctacctgactctcaacaacggtagtcaggccgtgggacgttcctccttctactgcctggagtacttcccctctcagatgctgagaacgggcaacaactttcaattcagctacactttcgaggacgtgcctttccacagcagctacgcgcacagccagagtttggacaggctgatgaatcctctcatcgaccagtacctgtactacctgtcaagaacccagactacgggaggcacagcgggaacccagacgttgcagttttctcaggccgggcctagcagcatggcgaatcaggccaaaaactggctgcctggaccctgctacagacagcagcgcgtctccacgacaacgaatcaaaacaacaacagcaactttgcctggactggtgccaccaagtatcatctgaacggcagagactctctggtgaatccgggcgtcgccatggcaacccacaaggacgacgaggaccgcttcttcccatccagcggcgtcctcatatttggcaagcagggagctggaaatgacaacgtggactatagcaacgtgatgataaccagcgaggaagaaatcaagaccaccaaccccgtggccacagaagagtatggcgtggtggctactaacctacagtcggcaaacaccgctcctcaaacggggaccgtcaacagccagggagccttacctggcatggtctggcagaaccgggacgtgtacctgcagggtcctatttgggccaagattcctcacacagatggcaactttcacccgtctcctttaatgggcggctttggacttaaacatccgcctcctcagatcctcatcaaaaacactcctgttcctgcggatcctccaacaacgttcaaccaggccaagctgaattctttcatcacgcagtacagcaccggacaagtcagcgtggagatcgagtgggagctgcagaaggagaacagcaagcgctggaacccagagattcagtatacttccaactactacaaatctacaaatgtggactttgctgttaatactgagggtgtttactctgagcctcgccccattggcactcgttacctcacccgtaatctg

SEQ ID NO: 3295 - protein, 738 aa, Artificial Sequence
  Synthetic polypeptide
MAADGYLPDWLEDNLSEGIREWWDLKPGAPKPKANQQKQDDGRGLVLPGYKYLGPFNGLDKGEPVNAADAAALEHDKAYDQQLKAGDNPYLRYNHADAEFQERLQEDTSFGGNLGRAVFQAKKRVLEPLGLVEEGAKTAPGKKRPVEQSPQREPDSSTGIGKKGQQPARKRLNFGQTGDSESVPDPQPLGEPPAAPSGVGSNTMAAGGGAPMADNNEGADGVGSSSGNWHCDSTWLGDRVITTSTRTWALPTYNNHLYKQISNGTSGGSTNDNTYFGYSTPWGYFDFNRFHCHFSPRDWQRLINNNWGFRPKRLNFKLFNIQVKEVTQNEGTKTIANNLTSTIQVFTDSEYQLPYVLGSAHQGCLPPFPADVFMIPQYGYLTLNNGSQAVGRSSFYCLEYFPSQMLRTGNNFQFSYTFEDVPFHSSYAHSQSLDRLMNPLIDQYLYYLSRTQTTGGTAGTQTLQFSQAGPSNMANQAKNWLPGPCYRQQRVSTTTSQNNNSNFAWTGATKYHLNGRDSLVNPGVAMATHKDDEDRFFPSSGILIFGKQGAGKDNVDYSNVMLTSEEEIKTTNPVATEEYGVVADNLQQQNTAPQIGTVNSQGALPGMVWQNRDVYLQGPIWAKIPHTDGNFHPSPLMGGFGLKHPPPQILIKNTPVPADPPTTFNQAKLNSFITQYSTGQVSVEIEWELQKENSKRWNPEIQYTSNYYKSTNVDFAVNTEGVYSEPRPIGTRYLTRNL

SEQ ID NO: 3296 - DNA, 2214 bp, Artificial Sequence
  Synthetic polynucleotide
atggctgccgatggttatcttccagattggctcgaggacaacctctctgagggcattcgcgagtggtgggacctgaaacctggagccccgaaacccaaagccaaccagcaaaagcaggacgacggccggggtctggtgcttcctggctacaagtacctcggacccttcaacggactcgacaagggggagcccgtcaacgcggcggacgcagcggccctcgagcacgacaaggcctacgaccagcagctcaaagcgggtgacaatccgtacctgcggtataatcacgccgacgccgagtttcaggagcgtctgcaagaagatacgtcttttgggggcaacctcgggcgagcagtcttccaggccaagaagcgggttctcgaacctctcggtctggttgaggaaggcgctaagacggctcctggaaagaagagaccggtagagcagtcaccacagcgtgagcccgactcctccacgggcatcggcaagaaaggccagcagcccgccagaaagagactcaatttcggtcagactggcgactcagagtcagtccccgaccctcaacctctcggagaacctccagcagcgccctctggtgtgggatctaatacaatggctgcaggcggtggcgcaccaatggcagacaataacgaaggtgccgacggagtgggtagttcctcgggaaattggcattgcgattccacatggctgggcgacagagtcatcaccaccagcacccgaacctgggccctgcccacctacaacaaccacctctacaagcaaatctccaacgggacctcgggaggcagcaccaacgacaacacctactttggctacagcaccccctgggggtattttgactttaacagattccactgccacttctcaccacgtgactggcagcgactcatcaacaacaactggggattccggcccaagagactcaacttcaagctcttcaacatccaggtcaaagaggtcacgcagaatgaaggcaccaagaccatcgccaataacctcaccagcaccatccaggtgtttacggactcggaataccagctgccgtacgtcctcggctctgcccaccagggctgcctgcctccgttcccggcggacgtcttcatgattcctcagtacggctacctgactctcaacaacggtagtcaggccgtgggacgttcctccttctactgcctggagtacttcccctctcagatgctgagaacgggcaacaactttcaattcagctacactttcgaggacgtgcctttccacagcagctacgcgcacagccagagtttggacaggctgatgaatcctctcatcgaccagtacctgtactacctgtcaagaacccagactacgggaggcacagcgggaacccagacgttgcagttttctcaggccgggcctagcaacatggcgaatcaggccaaaaactggctgcctggaccctgctacagacagcagcgcgtctccacgacaacgtcgcaaaacaacaacagcaactttgcctggactggtgccaccaagtatcatctgaacggcagagactctctggtgaatccgggcgtcgccatggcaacccacaaggacgacgaggaccgcttcttcccatccagcggcatcctcatatttggcaagcagggagctggaaaagacaacgtggactatagcaacgtgatgctaaccagcgaggaagaaatcaagaccaccaaccccgtggccacagaagagtatggcgtggtggctgataacctacagcagcaaaacaccgctcctcaaatagggaccgtcaacagccagggagccttacctggcatggtctggcagaaccgggacgtgtacctgcagggtcctatttgggccaagattcctcacacagatggcaactttcacccgtctcctttaatgggcggctttggacttaaacatccgcctcctcagatcctcatcaaaaacactcctgttcctgcggatcctccaacaacgttcaaccaggccaagctgaattctttcatcacgcagtacagcaccggacaagtcagcgtggagatcgagtgggagctgcagaaggagaacagcaagcgctggaacccagagattcagtatacttccaactactacaaatctacaaatgtggactttgctgttaatactgagggtgtttactctgagcctcgccccattggcactcgttacctcacccgtaatctg

SEQ ID NO: 3297 - protein, 738 aa, Artificial Sequence
  Synthetic polypeptide
MAADGYLPDWLEDNLSEGIREWWDLKPGAPKPKANQQKQDDGRGLVLPGYKYLGPFNGLDKGEPVNAADAAALEHDKAYDQQLKAGDNPYLRYNHADAEFQERLQEDTSFGGNLGRAVFQAKKRVLEPLGLVEEGAKTAPGKKRPVEPSPQRSPDSSTGIGKKGQQPARKRLNFGQTGDSESVPDPQPIGEPPAAPSGVGSGTMAAGGGAPMADNNEGADGVGSSSGNWHCDSTWLGDRVITTSTRTWALPTYNNHLYKQISNGTSGGSTNDNTYFGYSTPWGYFDFNRFHCHFSPRDWQRLINNNWGFRPKRLNFKLFNIQVKEVTQNEGTKTIANNLTSTIQVFTDSEYQLPYVLGSAHQGCLPPFPADVFMIPQYGYLTLNNGSQAVGRSSFYCLEYFPSQMLRTGNNFEFSYTFEDVPFHSSYAHSQSLDRLMNPLIDQYLYYLSRTQSTGGTAGTQQLLFSQAGPSNMSAQAKNWLPGPCYRQQRVSTTLSQNNNSNFAWTGATKYHLNGRDSLVNPGVAMATHKDDEDRFFPSSGILMFGKQGAGKDNVDYSNVMLTSEEEIKTTNPVATEQYGVVADNLQQQNTAPIVGAVNSQGALPGMVWQNRDVYLQGPIWAKIPHTDGNFHPSPLMGGFGLKHPPPQILIKNTPVPADPPTTFNQAKLNSFITQYSTGQVSVEIEWELQKENSKRWNPEIQYTSNYYKSTNVDFAVNTEGVYSEPRPIGTRYLTRNL

SEQ ID NO: 3298 - DNA, 2214 bp, Artificial Sequence
  Synthetic polynucleotide
atggctgccgatggttatcttccagattggctcgaggacaacctctctgagggcattcgcgagtggtgggacctgaaacctggagccccgaaacccaaagccaaccagcaaaagcaggacgacggccggggtctggtgcttcctggctacaagtacctcggacccttcaacggactcgacaagggggagcccgtcaacgcggcggacgcagcggccctcgagcacgacaaggcctacgaccagcagctcaaagcgggtgacaatccgtacctgcggtataatcacgccgacgccgagtttcaggagcgtctgcaagaagatacgtcttttgggggcaacctcgggcgagcagtcttccaggccaagaagcgggttctcgaacctctcggtctggttgaggaaggcgctaagacggctcctggaaagaagagaccggtagagccgtcaccacagcgttcccccgactcctccacgggcatcggcaagaaaggccagcagcccgccagaaagagactcaatttcggtcagactggcgactcagagtcagtccccgaccctcaacctatcggagaacctccagcagcgccctctggtgtgggatctggtacaatggctgcaggcggtggcgcaccaatggcagacaataacgaaggtgccgacggagtgggtagttcctcgggaaattggcattgcgattccacatggctgggcgacagagtcatcaccaccagcacccgaacctgggccctgcccacctacaacaaccacctctacaagcaaatctccaacgggacctcgggaggcagcaccaacgacaacacctactttggctacagcaccccctgggggtattttgactttaacagattccactgccacttctcaccacgtgactggcagcgactcatcaacaacaactggggattccggcccaagagactcaacttcaagctcttcaacatccaggtcaaagaggtcacgcagaatgaaggcaccaagaccatcgccaataacctcaccagcaccatccaggtgtttacggactcggaataccagctgccgtacgtcctcggctctgcccaccagggctgcctgcctccgttcccggcggacgtcttcatgattcctcagtacggctacctgactctcaacaacggtagtcaggccgtgggacgttcctccttctactgcctggagtacttcccctctcagatgctgagaacgggcaacaactttgagttcagctacactttcgaggacgtgcctttccacagcagctacgcgcacagccagagtttggacaggctgatgaatcctctcatcgaccagtacctgtactacctgtcaagaacccagtctacgggaggcacagcgggaacccagcagttgctgttttctcaggccgggcctagcaacatgtcggctcaggccaaaaactggctgcctggaccctgctacagacagcagcgcgtctccacgacactgtcgcaaaacaacaacagcaactttgcctggactggtgccaccaagtatcatctgaacggcagagactctctggtgaatccgggcgtcgccatggcaacccacaaggacgacgaggaccgcttcttcccatccagcggcatcctcatgtttggcaagcagggagctggaaaagacaacgtggactatagcaacgtgatgctaaccagcgaggaagaaatcaagaccaccaaccccgtggccacagaacagtatggcgtggtggctgataacctacagcagcaaaacaccgctcctattgtgggggccgtcaacagccagggagccttacctggcatggtctggcagaaccgggacgtgtacctgcagggtcctatttgggccaagattcctcacacagatggcaactttcacccgtctcctttaatgggcggctttggacttaaacatccgcctcctcagatcctcatcaaaaacactcctgttcctgcggatcctccaacaacgttcaaccaggccaagctgaattctttcatcacgcagtacagcaccggacaagtcagcgtggagatcgagtgggagctgcagaaggagaacagcaagcgctggaacccagagattcagtatacttccaactactacaaatctacaaatgtggactttgctgttaatactgagggtgtttactctgagcctcgccccattggcactcgttacctcacccgtaatctg

SEQ ID NO: 3299 - protein, 738 aa, Artificial Sequence
  Synthetic polypeptide
MAADGYLPDWLEDNLSEGIREWWDLKPGAPKPKANQQKQDDGRGLVLPGYKYLGPFNGLDKGEPVNAADAAALEHDKAYDQQLKAGDNPYLRYNHADAEFQERLQEDTSFGGNLGRAVFQAKKRVLEPLGLVEEGAKTAPGKKRPVEPSPQRSPDSSTGIGKKGQQPAKKRLNFGQTGDSESVPDPQPIGEPPAGPSGLGSGTMAAGGGAPMADNNEGADGVGSSSGNWHCDSTWLGDRVITTSTRTWALPTYNNHLYKQISNGTSGGSTNDNTYFGYSTPWGYFDFNRFHCHFSPRDWQRLINNNWGFRPKRLNFKLFNIQVKEVTQNEGTKTIANNLTSTIQVFTDSEYQLPYVLGSAHQGCLPPFPADVFMIPQYGYLTLNNGSQAVGRSSFYCLEYFPSQMLRTGNNFEFSYTFEDVPFHSSYAHSQSLDRLMNPLIDQYLYYLSRTQSTGGTAGTQQLLFSQAGPSNMSAQAKNWLPGPCYRQQRVSTTLSQNNNSNFAWTGATKYHLNGRDSLVNPGVAMATHKDDEERFFPSSGVLMFGKQGAGKDNVDYSSVMLTSEEEIKTTNPVATEQYGVVADNLQQQNTAPIVGAVNSQGALPGMVWQNRDVYLQGPIWAKIPHTDGNFHPSPLMGGFGLKHPPPQILIKNTPVPADPPTTFSQAKLASFITQYSTGQVSVEIEWELQKENSKRWNPEIQYTSNYYKSTNVDFAVNTEGTYSEPRPIGTRYLTRNL

SEQ ID NO: 3300 - DNA, 2214 bp, Artificial Sequence
  Synthetic polynucleotide
atggctgccgatggttatcttccagattggctcgaggacaacctctctgagggcattcgcgagtggtgggacttgaaacctggagccccgaaacccaaagccaaccagcaaaagcaggacgacggccggggtctggtgcttcctggctacaagtacctcggacccttcaacggactcgacaagggggagcccgtcaacgcggcggacgcagcggccctcgagcacgacaaggcctacgaccagcagctcaaagcgggtgacaatccgtacctgcggtataaccacgccgacgccgagtttcaggagcgtctgcaagaagatacgtcttttgggggcaacctcgggcgagcagtcttccaggccaagaagcgggttctcgaacctctcggtctggttgaggaaggcgctaagacggctcctggaaagaagagaccggtagagccatcaccccagcgttctccagactcctctacgggcatcggcaagaaaggccagcagcccgcgaaaaagagactcaactttgggcagactggcgactcagagtcagtgcccgaccctcaaccaatcggagaaccccccgcaggcccctctggtctgggatctggtacaatggctgcaggcggtggcgctccaatggcagacaataacgaaggcgccgacggagtgggtagttcctcaggaaattggcattgcgattccacatggctgggcgacagagtcatcaccaccagcacccgaacctgggccctccccacctacaacaaccacctctacaagcaaatctccaacgggacttcgggaggaagcaccaacgacaacacctacttcggctacagcaccccctgggggtattttgactttaacagattccactgccacttctcaccacgtgactggcagcgactcatcaacaacaactggggattccggcccaagagactcaacttcaagctcttcaacatccaggtcaaggaggtcacgcagaatgaaggcaccaagaccatcgccaataaccttaccagcacgattcaggtctttacggactcggaataccagctcccgtacgtcctcggctctgcgcaccagggctgcctgcctccgttcccggcggacgtcttcatgattcctcagtacgggtacctgactctgaacaatggcagtcaggccgtgggccgttcctccttctactgcctggagtactttccttctcaaatgctgagaacgggcaacaactttgagttcagctacacgtttgaggacgtgccttttcacagcagctacgcgcacagccaaagcctggaccggctgatgaaccccctcatcgaccagtacctgtactacctgtctcggactcagtccacgggaggtaccgcaggaactcagcagttgctattttctcaggccgggcctagtaacatgtcggctcaggccaaaaactggctacccgggccctgctaccggcagcaacgcgtctccacgacactgtcgcaaaataacaacagcaactttgcctggaccggtgccaccaagtatcatctgaatggcagagactctctggtaaatcccggtgtcgctatggcaacccacaaggacgacgaagagcgattttttccgtccagcggagtcttaatgtttgggaaacagggagctggaaaagacaacgtggactatagcagcgttatgctaaccagtgaggaagaaattaaaaccaccaacccagtggccacagaacagtacggcgtggtggccgataacctgcaacagcaaaacaccgctcctattgtaggggccgtcaacagtcaaggagccttacctggcatggtctggcagaaccgggacgtgtacctgcagggtcctatctgggccaagattcctcacacggacggaaactttcatccctcgccgctgatgggaggctttggactgaaacacccgcctcctcagatcctgattaagaatacacctgttcccgcggatcctccaactaccttcagtcaagctaagctggcgtcgttcatcacgcagtacagcaccggacaggtcagcgtggaaattgaatgggagctgcagaaagaaaacagcaaacgctggaacccagagattcaatacacttccaactactacaaatctacaaatgtggactttgctgttaacacagaaggcacttattctgagcctcgccccatcggcacccgttacctcacccgtaatctg

SEQ ID NO: 3301 - protein, 737 aa, Artificial Sequence
  Synthetic polypeptide
MAADGYLPDWLEDNLSEGIREWWDLKPGAPKPKANQQKQDDGRGLVLPGYKYLGPFNGLDKGEPVNAADAAALEHDKAYDQQLKAGDNPYLRYNHADAEFQERLQEDTSFGGNLGRAVFQAKKRVLEPLGLVEEGAKTAPGKKRPVEPSPQRSPDSSTGIGKKGQQPAKKRLNFGQTGDSESVPDPQPLGEPPAAPSGVGSGTMAAGGGAPMADNNEGADGVGNASGNWHCDSTWLGDRVITTSTRTWALPTYNNHLYKQISSQSAGSTNDNTYFGYSTPWGYFDFNRFHCHFSPRDWQRLINNNWGFRPKKLRFKLFNIQVKEVTTNDGVTTIANNLTSTVQVFSDSEYQLPYVLGSAHQGCLPPFPADVFMIPQYGYLTLNNGSQSVGRSSFYCLEYFPSQMLRTGNNFEFSYTFEDVPFHSSYAHSQSLDRLMNPLIDQYLYYLARTQSTTGGTAGNRELQFYQAGPSTMAEQAKNWLPGPCYRQQRVSKTLDQNNNSNFAWTGATKYHLNGRNSLVNPGVAMATHKDDEDRFFPSSGVLIFGKTGAANKTTLENVLMTNEEEIKTTNPVATEEYGVVSSNLQSANTAPQTQTVNSQGALPGMVWQNRDVYLQGPIWAKIPHTDGNFHPSPLMGGFGLKHPPPQILIKNTPVPANPPEVFTPAKFASFITQYSTGQVSVEIEWELQKENSKRWNPEIQYTSNYDKSTNVDFAVDSEGVYSEPRPIGTRYLTRNL

SEQ ID NO: 3302 - DNA, 2211 bp, Artificial Sequence
  Synthetic polynucleotide
atggctgccgatggttatcttccagattggctcgaggacaacctctctgagggcattcgcgagtggtgggacctgaaacctggagccccgaaacccaaagccaaccagcaaaagcaggacgacggccggggtctggtgcttcctggctacaagtacctcggacccttcaacggactcgacaagggggagcccgtcaacgcggcggacgcagcggccctcgagcacgacaaggcctacgaccagcagctcaaagcgggtgacaatccgtacctgcggtataaccacgccgacgccgagtttcaggagcgtctgcaagaagatacgtcatttgggggcaacctcgggcgagcagtcttccaggccaagaagcgggttctcgaacctctcggtctggttgaggaaggcgctaagacggctcctggaaagaagagaccggtagagccgtcacctcagcgttcccccgactcctccacgggcatcggcaagaaaggccagcagcccgccaaaaagagactcaatttcggtcagactggcgactcagagtcagtccccgaccctcaacctctcggagaacctccagcagcgccctctggtgtgggatctggtacaatggctgcaggcggtggcgcaccaatggcagacaataacgaaggtgccgacggagtgggtaatgcctcaggaaattggcattgcgattccacatggctgggcgacagagtcattaccaccagcacccgaacctgggccctgcccacctacaacaaccacctctacaagcaaatctccagtcaaagtgcaggtagtaccaacgacaacacctacttcggctacagcaccccctgggggtattttgactttaacagattccactgccacttctcaccacgtgactggcagcgactcatcaacaacaactggggattccggcccaagaagctgcggttcaagctcttcaacatccaggtcaaggaggtcacgacgaatgacggcgttacgaccatcgctaataaccttaccagcacggttcaggtattctcggactcggaataccagctgccgtacgtcctcggctctgcgcaccagggctgcctgcctccgttcccggcggacgtcttcatgattcctcagtacggctacctgactctcaacaatggcagtcagtctgtgggacgttcctccttctactgcctggagtacttcccctctcagatgctgagaacgggcaacaactttgagttcagctacaccttcgaggacgtgcctttccacagcagctacgcacacagccagagcctggaccggctgatgaatcccctcatcgaccagtacttgtactacctggccagaacacagagtaccacaggaggcacagctggcaatcgggaactgcagttttaccaggccgggccttcaactatggccgaacaagccaagaattggttacctggaccttgctaccggcaacaaagagtctccaaaacgctggatcaaaacaacaacagcaactttgcttggactggtgccaccaaatatcacctgaacggcagaaactcgttggttaatcccggcgtcgccatggcaactcacaaggacgacgaggaccgctttttcccatccagcggagtcctgatttttggaaaaactggagcagctaacaaaactacattggaaaatgtgttaatgacaaatgaagaagaaattaaaactactaatcctgtagccacggaagaatacggggtagtcagcagcaacttacaatcggctaatactgcaccccagacacaaactgtcaacagccagggagccttacctggcatggtctggcagaaccgggacgtgtacctgcagggtcccatctgggccaagattcctcacacggatggcaactttcacccgtctcctttgatgggcggctttggacttaaacatccgcctcctcagatcctgatcaagaacactcccgttcccgctaatcctccggaggtgtttactcctgccaagtttgcttcgttcatcacacagtacagcaccggacaagtcagcgtggaaatcgagtgggagctgcagaaggaaaacagcaagcgctggaacccggagattcagtacacctccaactatgataagtcgactaatgtggactttgccgttgacagcgagggtgtttactctgagcctcgccctattggcactcgttacctcacccgtaatctg

SEQ ID NO: 3303 - protein, 735 aa, Artificial Sequence
  Synthetic polypeptide
MAADGYLPDWLEDNLSEGIREWWDLKPGAPKPKANQQKQDDGRGLVLPGYKYLGPFNGLDKGEPVNAADAAALEHDKAYDQQLKAGDNPYLRYNHADAEFQERLQEDTSFGGNLGRAVFQAKKRVLEPLGLVEEGAKTAPGKKRPVEQSPQEPDSSSGIGKSGQQPAKKRLNFGQTGDSESVPDPQPLGEPPAAPSGVGSNTMASGGGAPMADNNEGADGVGNASGNWHCDSTWLGDRVITTSTRTWALPTYNNHLYKQISSQSGASNDNHYFGYSTPWGYFDFNRFHCHFSPRDWQRLINNNWGFRPKRLNFKLFNIQVKEVTTNDGTTTIANNLTSTVQVFTDSEYQLPYVLGSAHQGCLPPFPADVFMIPQYGYLTLNNGSQAVGRSSFYCLEYFPSQMLRTGNNFTFSYTFEDVPFHSSYAHSQSLDRLMNPLIDQYLYYLSRTQTTSGTAQNRELQFSQAGPSSMANQAKNWLPGPCYRQQRVSKTANDNNNSNFAWTGATKYHLNGRDSLVNPGPAMASHKDDEDKFFPMSGVLIFGKQGAGASNVDLDNVMITDEEEIKTTNPVATEQYGTVATNLQSSNTAPATGTVNSQGALPGMVWQDRDVYLQGPIWAKIPHTDGHFHPSPLMGGFGLKHPPPQILIKNTPVPANPPTTFSPAKFASFITQYSTGQVSVEIEWELQKENSKRWNPEIQYTSNYNKSANVDFTVDTNGVYSEPRPIGTRYLTRNL

SEQ ID NO: 3304 - DNA, 2205 bp, Artificial Sequence
  Synthetic polynucleotide
atggctgccgatggttatcttccagattggctcgaggacaacctctctgagggcattcgcgagtggtgggacttgaaacctggagccccgaaacccaaagccaaccagcaaaagcaggacgacggccggggtctggtgcttcctggctacaagtacctcggacccttcaacggactcgacaagggggagcccgtcaacgcggcggatgcagcggccctcgagcacgacaaggcctacgaccagcagctcaaagcgggtgacaatccgtacctgcggtataaccacgccgacgccgagtttcaggagcgtctgcaagaagatacgtcttttgggggcaacctcgggcgagcagtcttccaggccaagaagagggttctcgaacctcttggtctggttgaggaaggtgctaagacggctcctggaaagaaacgtccggtagagcagtcgccacaagagccagactcctcctcgggcattggcaagtcaggccagcagcccgctaaaaagagactcaattttggtcagactggcgactcagagtcagtccccgacccacaacctctcggagaacctccagcagccccctctggtgtgggatctaatacaatggcttcaggcggtggcgcaccaatggcagacaataacgaaggcgccgacggagtgggtaatgcctcaggaaattggcattgcgattccacatggctgggcgacagagtcatcaccaccagcacccgaacatgggccttgcccacctataacaaccacctctacaagcaaatctccagtcaatcaggggccagcaacgacaaccactacttcggctacagcaccccctgggggtattttgatttcaacagattccactgccatttctcaccacgtgactggcagcgactcatcaacaacaattggggattccggcccaagagactcaacttcaagctcttcaacatccaagtcaaggaggtcacgacgaatgatggcaccacgaccatcgctaataaccttaccagcacggttcaagtcttcacggactcggagtaccagttgccgtacgtcctcggctctgcgcaccagggctgcctccctccgttcccggcggacgtgttcatgattccgcagtacggctacctaacgctcaacaatggcagccaggcagtgggacggtcatccttttactgcctggaatatttcccatcgcagatgctgagaacgggcaataactttaccttcagctacaccttcgaggacgtgcctttccacagcagctacgcgcacagccagagcctggaccggctgatgaatcctctcatcgaccagtacctgtattacctgagcagaactcagactacgtccggaactgcccaaaacagggagttgcagtttagccaggcgggtccatctagcatggctaatcaggccaaaaactggctacctggaccctgttaccggcagcagcgcgtttctaaaacagcaaatgacaacaacaacagcaactttgcctggactggtgctacaaaatatcaccttaatgggcgtgattctttagtcaaccctggccctgctatggcctcacacaaagacgacgaagacaagttctttcccatgagcggtgtcttgatttttggaaagcagggcgccggagcttcaaacgttgatttggacaatgtcatgatcacagacgaagaggaaatcaaaaccactaaccccgtggccaccgaacaatatgggactgtggcaaccaatctccagagcagcaacacagcccctgcgaccggaactgtgaattctcagggagccttacctggaatggtgtggcaagacagagacgtatacctgcagggtcctatttgggccaaaattcctcacacggatggacactttcacccgtctcctctcatgggcggctttggacttaagcacccgcctcctcagatcctcatcaaaaacacgcctgttcctgcgaatcctccgacaacgttttcgcctgcaaagtttgcttcattcatcacccagtattccacaggacaagtgagcgtggagattgaatgggagctgcagaaagaaaacagcaaacgctggaatcccgaaatacagtatacatctaactataataaatctgccaacgttgatttcactgtggacaccaatggagtttatagtgagcctcgccccattggcacccgttacctcacccgtaacctg

SEQ ID NO: 3305 - protein, 735 aa, Artificial Sequence
  Synthetic polypeptide
MAADGYLPDWLEDNLSEGIREWWDLKPGAPQPKANQQHQDDGRGLVLPGYKYLGPFNGLDKGEPVNEADAAALEHDKAYDQQLKAGDNPYLKYNHADAEFQERLQEDTSFGGNLGRAVFQAKKRVLEPLGLVEEAAKTAPGKKRPVEQSPQEPDSSSGIGKSGQQPARKRLNFGQTGDSESVPDPQPLGEPPAAPSGVGSNTMASGGGAPMADNNEGADGVGNSSGNWHCDSTWLGDRVITTSTRTWALPTYNNHLYKQISSQSGASNDNHYFGYSTPWGYFDFNRFHCHFSPRDWQRLINNNWGFRPKKLNFKLFNIQVKEVTQNDGTTTIANNLTSTVQVFTDSEYQLPYVLGSAHQGCLPPFPADVFMIPQYGYLTLNNGSQAVGRSSFYCLEYFPSQMLRTGNNFTFSYTFEDVPFHSSYAHSQSLDRLMNPLIDQYLYYLSRTQTTSGTTQQSRLQFSQAGPSSMAQQAKNWLPGPCYRQQRVSKTANDNNNSNFAWTGATKYHLNGRDSLVNPGPAMASHKDDEEKFFPMHGVLIFGKQGTGASNVDLDNVMITDEEEIRTTNPVATEQYGTVATNLQSSNTAPATGTVNSQGALPGMVWQDRDVYLQGPIWAKIPHTDGHFHPSPLMGGFGLKHPPPQILIKNTPVPANPPTTFSPAKFASFITQYSTGQVSVEIEWELQKENSKRWNPEIQYTSNYNKSVNVDFTVDTNGVYSEPRPIGTRYLTRNL

SEQ ID NO: 3306 - DNA, 2205 bp, Artificial Sequence
  Synthetic polynucleotide
atggctgctgacggttatcttccagattggctcgaggacaacctttctgaaggcattcgtgagtggtgggatctgaaacctggagcccctcaacccaaagcgaaccaacaacaccaggacgacggtcggggtcttgtgcttccgggttacaaatacctcggaccctttaacggactcgacaaaggagagccggtcaacgaggcggacgcggcagccctcgaacacgacaaagcttacgaccagcagctcaaggccggtgacaacccgtacctcaagtacaaccacgccgacgccgagtttcaggagcgtcttcaagaagatacgtcttttgggggcaaccttggcagagcagtcttccaggccaaaaagagggtccttgagcctcttggtctggttgaggaagcagctaaaacggctcctggaaagaagaggcctgtagaacagtctcctcaggaaccggactcatcatctggtattggcaaatcgggccaacagcctgccagaaaaagactaaatttcggtcagactggagactcagagtcagtcccagaccctcaacctctcggagaaccaccagcagccccctcaggtgtgggatctaatacaatggcttcaggcggtggcgcaccaatggcagacaataacgagggtgccgatggagtgggtaattcctcaggaaattggcattgcgattccacatggctgggcgacagagtcatcaccaccagcaccagaacctgggccctgcccacttacaacaaccatctctacaagcaaatctccagccaatcaggagcttcaaacgacaaccactactttggctacagcaccccttgggggtattttgactttaacagattccactgccacttctcaccacgtgactggcagcgactcattaacaacaactggggattccggcccaagaaactcaacttcaagctcttcaacatccaagttaaagaggtcacgcagaacgatggcacgacgactattgccaataaccttaccagcacggttcaagtgtttacggactcggagtatcagctcccgtacgtgctcgggtcggcgcaccaaggctgtctcccgccgtttccagcggacgtcttcatgatccctcagtatggatacctcaccctgaacaacggaagtcaagcggtgggacgctcatccttttactgcctggagtacttcccttcgcagatgctaaggactggaaataacttcacattcagctataccttcgaggatgtaccttttcacagcagctacgctcacagccagagtttggatcgcttgatgaatcctcttattgatcagtatctgtactacctgagcagaacgcaaacaacctctggaacaacccaacaatcacggctgcaatttagccaggctgggccttcgtctatggctcagcaggccaaaaattggctacctgggccctgctaccggcaacagagagtttcaaagactgctaacgacaacaacaacagtaactttgcttggacaggggccaccaaatatcatctcaatggccgcgactcgctggtgaatccaggaccagctatggccagtcacaaggacgatgaagaaaaatttttccctatgcacggcgttctaatatttggcaaacaagggacaggggcaagtaacgtagatttagataatgtaatgattacggatgaagaagagattcgtaccaccaatcctgtggcaacagagcagtatggaactgtggcaactaacttgcagagctcaaatacagctcccgcgactggaactgtcaatagtcagggggccttacctggcatggtgtggcaagatcgtgacgtgtaccttcaaggacctatctgggcaaagattcctcacacggatggacactttcatccttctcctctgatgggaggctttggactgaaacatccgcctcctcaaatcttgatcaaaaatactccggtaccggcaaatcctccgacgactttcagcccggccaagtttgcttcatttatcactcagtactccactggacaggtcagcgtggaaattgagtgggagctacagaaagaaaacagcaaacgttggaatccagagattcagtacacttccaactacaacaagtctgttaatgtggactttactgtagacactaatggtgtttatagtgaacctcgccctattggaacccggtatctcacacgaaacttg

SEQ ID NO: 3307 - protein, 736 aa, Artificial Sequence
  Synthetic polypeptide
MAADGYLPDWLEDNLSEGIREWWDLKPGAPKPKANQQKQDDGRGLVLPGYKYLGPFNGLDKGEPVNAADAAALEHDKAYDQQLKAGDNPYLRYNHADAEFQERLQEDTSFGGNLGRAVFQAKKRVLEPLGLVEEGAKTAPGKKRPVEQSPQEPDSSSGIGKKGQQPARKRLNFGQTGDSESVPDPQPLGEPPAAPSGVGSNTMAAGGGAPMADNNEGADGVGNASGNWHCDSTWLGDRVITTSTRTWALPTYNNHLYKQISSQSGGSTNDNTYFGYSTPWGYFDFNRFHCHFSPRDWQRLINNNWGFRPKRLNFKLFNIQVKEVTTNDGTTTIANNLTSTVQVFTDSEYQLPYVLGSAHQGCLPPFPADVFMIPQYGYLTLNNGSQAVGRSSFYCLEYFPSQMLRTGNNFEFSYTFEDVPFHSSYAHSQSLDRLMNPLIDQYLYYLSRTQTTSGTAGNRTLQFSQAGPSSMANQAKNWLPGPCYRQQRVSKTANQNNNSNFAWTGATKYHLNGRDSLVNPGPAMATHKDDEDKFFPMSGVLIFGKQGAGNSNVDLDNVMITNEEEIKTTNPVATEQYGTVATNLQSANTAPATGTVNSQGALPGMVWQDRDVYLQGPIWAKIPHTDGHFHPSPLMGGFGLKHPPPQILIKNTPVPANPPTTFSPAKFASFITQYSTGQVSVEIEWELQKENSKRWNPEIQYTSNYNKSTNVDFAVDTNGVYSEPRPIGTRYLTRNL

SEQ ID NO: 3308 - protein, 736 aa, Artificial Sequence
  Synthetic polypeptide
MAADGYLPDWLEDNLSEGIREWWDLKPGAPKPKANQQKQDDGRGLVLPGYKYLGPFNGLDKGEPVNAADAAALEHDKAYDQQLKAGDNPYLRYNHADAEFQERLQEDTSFGGNLGRAVFQAKKRVLEPLGLVEEGAKTAPGKKRPVEQSPQEPDSSSGIGKKGQQPAKKRLNFGQTGDSESVPDPQPLGEPPAAPSGVGSNTMASGGGAPMADNNEGADGVGNASGNWHCDSTWLGDRVITTSTRTWALPTYNNHLYKQISSQSGASTNDNTYFGYSTPWGYFDFNRFHCHFSPRDWQRLINNNWGFRPKRLNFKLFNIQVKEVTTNDGTTTIANNLTSTVQVFTDSEYQLPYVLGSAHQGCLPPFPADVFMIPQYGYLTLNNGSQAVGRSSFYCLEYFPSQMLRTGNNFQFSYTFEDVPFHSSYAHSQSLDRLMNPLIDQYLYYLSRTQTTSGTAGNRELQFSQAGPSSMANQAKNWLPGPCYRQQRVSKTTNQNNNSNFAWTGATKYHLNGRDSLVNPGPAMATHKDDEDKFFPMSGVLIFGKQGAGNSNVDLDNVMITNEEEIKTTNPVATEEYGTVATNLQSANTAPATGTVNSQGALPGMVWQNRDVYLQGPIWAKIPHTDGHFHPSPLMGGFGLKHPPPQILIKNTPVPANPPTTFSPAKFASFITQYSTGQVSVEIEWELQKENSKRWNPEIQYTSNYNKSTNVDFAVDTNGVYSEPRPIGTRYLTRNL

SEQ ID NO: 3309 - protein, 736 aa, Artificial Sequence
  Synthetic polypeptide
MAADGYLPDWLEDNLSEGIREWWDLKPGAPKPKANQQKQDDGRGLVLPGYKYLGPFNGLDKGEPVNAADAAALEHDKAYDQQLKAGDNPYLRYNHADAEFQERLQEDTSFGGNLGRAVFQAKKRVLEPLGLVEEGAKTAPGKKRPVEQSPQEPDSSSGIGKKGQQPARKRLNFGQTGDSESVPDPQPLGEPPAAPSGVGSNTMAAGGGAPMADNNEGADGVGNASGNWHCDSTWLGDRVITTSTRTWALPTYNNHLYKQISSQSGGSTNDNTYFGYSTPWGYFDFNRFHCHFSPRDWQRLINNNWGFRPKRLNFKLFNIQVKEVTTNDGTTTIANNLTSTVQVFTDSEYQLPYVLGSAHQGCLPPFPADVFMIPQYGYLTLNNGSQAVGRSSFYCLEYFPSQMLRTGNNFEFSYTFEDVPFHSSYAHSQSLDRLMNPLIDQYLYYLSRTQTTSGTAGNRELQFSQAGPSSMANQAKNWLPGPCYRQQRVSKTTNQNNNSNFAWTGATKYHLNGRDSLVNPGPAMATHKDDEDKFFPMSGVLIFGKQGAGNSNVDLDNVMITSEEEIKTTNPVATEEYGTVATNLQSSNTAPATGTVNSQGALPGMVWQERDVYLQGPIWAKIPHTDGHFHPSPLMGGFGLKHPPPQILIKNTPVPANPPTTFSPAKFASFITQYSTGQVSVEIEWELQKENSKRWNPEIQYTSNYNKSTNVDFAVDTNGVYSEPRPIGTRYLTRNL

SEQ ID NO: 3310 - protein, 736 aa, Artificial Sequence
  Synthetic polypeptide
MAADGYLPDWLEDNLSEGIREWWDLKPGAPKPKANQQKQDDGRGLVLPGYKYLGPFNGLDKGEPVNAADAAALEHDKAYDQQLKAGDNPYLRYNHADAEFQERLQEDTSFGGNLGRAVFQAKKRVLEPLGLVEEGAKTAPGKKRPVEQSPQEPDSSSGIGKKGQQPARKRLNFGQTGDSESVPDPQPLGEPPAAPSGVGSNTMASGGGAPMADNNEGADGVGNASGNWHCDSTWLGDRVITTSTRTWALPTYNNHLYKQISSQSGGSTNDNTYFGYSTPWGYFDFNRFHCHFSPRDWQRLINNNWGFRPKKLNFKLFNIQVKEVTTNDGTTTIANNLTSTVQVFTDSEYQLPYVLGSAHQGCLPPFPADVFMIPQYGYLTLNNGSQAVGRSSFYCLEYFPSQMLRTGNNFEFSYTFEDVPFHSSYAHSQSLDRLMNPLIDQYLYYLSRTQTTSGTAGNRELQFSQAGPSSMANQAKNWLPGPCYRQQRVSKTTNQNNNSNFAWTGATKYHLNGRDSLVNPGPAMATHKDDEDKFFPMSGVLIFGKQGAGNSNVDLDNVMITSEEEIKTTNPVATEEYGTVATNLQSANTAPATGTVNSQGALPGMVWQDRDVYLQGPIWAKIPHTDGHFHPSPLMGGFGLKHPPPQILIKNTPVPANPPTTFSPAKFASFITQYSTGQVSVEIEWELQKENSKRWNPEIQYTSNYNKSTNVDFAVDTNGVYSEPRPIGTRYLTRNL

SEQ ID NO: 3311 - protein, 736 aa, Artificial Sequence
  Synthetic polypeptide
MAADGYLPDWLEDNLSEGIREWWDLKPGAPKPKANQQKQDDGRGLVLPGYKYLGPFNGLDKGEPVNAADAAALEHDKAYDQQLKAGDNPYLRYNHADAEFQERLQEDTSFGGNLGRAVFQAKKRVLEPLGLVEEGAKTAPGKKRPVEQSPQEPDSSSGIGKKGQQPARKRLNFGQTGDSESVPDPQPLGEPPAAPSGVGSNTMAAGGGAPMADNNEGADGVGNASGNWHCDSTWLGDRVITTSTRTWALPTYNNHLYKQISSQSGGSTNDNTYFGYSTPWGYFDFNRFHCHFSPRDWQRLINNNWGFRPKKLNFKLFNIQVKEVTTNDGTTTIANNLTSTVQVFTDSEYQLPYVLGSAHQGCLPPFPADVFMIPQYGYLTLNNGSQAVGRSSFYCLEYFPSQMLRTGNNFQFSYTFEDVPFHSSYAHSQSLDRLMNPLIDQYLYYLSRTQTTSGTAGNRTLQFSQAGPSSMANQAKNWLPGPCYRQQRVSKTTNQNNNSNFAWTGATKYHLNGRDSLVNPGPAMATHKDDEDKFFPMSGVLIFGKQGAGNSNVDLDNVMITNEEEIKTTNPVATEEYGTVATNLQSANTAPATGTVNSQGALPGMVWQDRDVYLQGPIWAKIPHTDGHFHPSPLMGGFGLKHPPPQILIKNTPVPANPPTTFSPAKFASFITQYSTGQVSVEIEWELQKENSKRWNPEIQYTSNYNKSTNVDFAVDTNGVYSEPRPIGTRYLTRNL

SEQ ID NO: 3312 - protein, 736 aa, Artificial Sequence
  Synthetic polypeptide
MAADGYLPDWLEDNLSEGIREWWDLKPGAPKPKANQQKQDDGRGLVLPGYKYLGPFNGLDKGEPVNAADAAALEHDKAYDQQLKAGDNPYLRYNHADAEFQERLQEDTSFGGNLGRAVFQAKKRVLEPLGLVEEGAKTAPGKKRPVEQSPQEPDSSSGIGKKGQQPAKKRLNFGQTGDSESVPDPQPLGEPPAAPSGVGSNTMAAGGGAPMADNNEGADGVGNASGNWHCDSTWLGDRVITTSTRTWALPTYNNHLYKQISSQSGGSTNDNTYFGYSTPWGYFDFNRFHCHFSPRDWQRLINNNWGFRPKKLNFKLFNIQVKEVTTNDGTTTIANNLTSTVQVFTDSEYQLPYVLGSAHQGCLPPFPADVFMIPQYGYLTLNNGSQAVGRSSFYCLEYFPSQMLRTGNNFEFSYTFEDVPFHSSYAHSQSLDRLMNPLIDQYLYYLSRTQTTSGTAGNRTLQFSQAGPSSMANQAKNWLPGPCYRQQRVSKTANQNNNSNFAWTGATKYHLNGRDSLVNPGPAMATHKDDEDKFFPMSGVLIFGKQGAGNSNVDLDNVMITSEEEIKTTNPVATEQYGTVATNLQSSNTAPATGTVNSQGALPGMVWQNRDVYLQGPIWAKIPHTDGHFHPSPLMGGFGLKHPPPQILIKNTPVPANPPTTFSPAKFASFITQYSTGQVSVEIEWELQKENSKRWNPEIQYTSNYNKSTNVDFAVDTNGVYSEPRPIGTRYLTRNL

SEQ ID NO: 3313 - protein, 736 aa, Artificial Sequence
  Synthetic polypeptide
MAADGYLPDWLEDNLSEGIREWWDLKPGAPKPKANQQKQDDGRGLVLPGYKYLGPFNGLDKGEPVNAADAAALEHDKAYDQQLKAGDNPYLRYNHADAEFQERLQEDTSFGGNLGRAVFQAKKRVLEPLGLVEEGAKTAPGKKRPVEQSPQEPDSSSGIGKKGQQPAKKRLNFGQTGDSESVPDPQPLGEPPAAPSGVGSNTMASGGGAPMADNNEGADGVGNASGNWHCDSTWLGDRVITTSTRTWALPTYNNHLYKQISSQSGGSTNDNTYFGYSTPWGYFDFNRFHCHFSPRDWQRLINNNWGFRPKKLNFKLFNIQVKEVTTNDGTTTIANNLTSTVQVFTDSEYQLPYVLGSAHQGCLPPFPADVFMIPQYGYLTLNNGSQAVGRSSFYCLEYFPSQMLRTGNNFEFSYTFEDVPFHSSYAHSQSLDRLMNPLIDQYLYYLSRTQTTSGTAGNRTLQFSQAGPSSMANQAKNWLPGPCYRQQRVSKTANQNNNSNFAWTGATKYHLNGRDSLVNPGPAMATHKDDEDKFFPMSGVLIFGKQGAGNSNVDLDNVMITSEEEIKTTNPVATEEYGTVATNLQSSNTAPATGTVNSQGALPGMVWQNRDVYLQGPIWAKIPHTDGHFHPSPLMGGFGLKHPPPQILIKNTPVPANPPTTFSPAKFASFITQYSTGQVSVEIEWELQKENSKRWNPEIQYTSNYNKSTNVDFAVDTNGVYSEPRPIGTRYLTRNL

SEQ ID NO: 3314 - protein, 736 aa, Artificial Sequence
  Synthetic polypeptide
MAADGYLPDWLEDNLSEGIREWWDLKPGAPKPKANQQKQDDGRGLVLPGYKYLGPFNGLDKGEPVNAADAAALEHDKAYDQQLKAGDNPYLRYNHADAEFQERLQEDTSFGGNLGRAVFQAKKRVLEPLGLVEEGAKTAPGKKRPVEQSPQEPDSSSGIGKKGQQPAKKRLNFGQTGDSESVPDPQPLGEPPAAPSGVGSNTMASGGGAPMADNNEGADGVGNASGNWHCDSTWLGDRVITTSTRTWALPTYNNHLYKQISSQSGGSTNDNTYFGYSTPWGYFDFNRFHCHFSPRDWQRLINNNWGFRPKKLNFKLFNIQVKEVTTNDGTTTIANNLTSTVQVFTDSEYQLPYVLGSAHQGCLPPFPADVFMIPQYGYLTLNNGSQAVGRSSFYCLEYFPSQMLRTGNNFQFSYTFEDVPFHSSYAHSQSLDRLMNPLIDQYLYYLSRTQTTSGTAGNRELQFSQAGPSSMANQAKNWLPGPCYRQQRVSKTTNQNNNSNFAWTGATKYHLNGRDSLVNPGPAMATHKDDEDKFFPMSGVLIFGKQGAGNSNVDLDNVMITNEEEIKTTNPVATEQYGTVATNLQSANTAPATGTVNSQGALPGMVWQDRDVYLQGPIWAKIPHTDGHFHPSPLMGGFGLKHPPPQILIKNTPVPANPPTTFSPAKFASFITQYSTGQVSVEIEWELQKENSKRWNPEIQYTSNYNKSTNVDFAVDTNGVYSEPRPIGTRYLTRNL

SEQ ID NO: 3315 - DNA, 2211 bp, Artificial Sequence
  Synthetic polynucleotide
atggctgccgatggttatcttccagattggctcgaggacaacctctctgagggcattcgcgagtggtgggacttgaaacctggagccccgaaacccaaagccaaccagcaaaagcaggacgacggccggggtctggtgcttcctggctacaagtacctcggacccttcaacggactcgacaagggggagcccgtcaacgcggcggacgcagcggccctcgagcacgacaaggcctacgaccagcagctcaaagcgggtgacaatccgtacctgcggtataaccacgccgacgccgagtttcaggagcgtctgcaagaagatacgtcttttgggggcaacctcgggcgagcagtcttccaggccaagaagcgggttctcgaacctctcggtctggttgaggaaggcgctaagacggctcctggaaagaagagaccggtagagcaatcaccccaggaaccagactcctcttcgggcatcggcaagaaaggccagcagcccgcgaaaaagagactcaactttgggcagacaggcgactcagagtcagtgcccgaccctcaaccactcggagaaccccccgcagccccctctggtgtgggatctaatacaatggctgcaggcggtggcgctccaatggcagacaataacgaaggcgccgacggagtgggtaacgcctcaggaaattggcattgcgattccacatggctgggcgacagagtcatcaccaccagcacccgaacctgggccctccccacctacaacaaccacctctacaagcaaatctccagccaatcgggagcaagcaccaacgacaacacctacttcggctacagcaccccctgggggtattttgactttaacagattccactgccacttctcaccacgtgactggcagcgactcatcaacaacaactggggattccggcccaagagactcaacttcaagctcttcaacatccaggtcaaggaggtcacgacgaatgatggcaccacgaccatcgccaataaccttaccagcacggttcaggtctttacggactcggaataccagctcccgtacgtcctcggctctgcgcaccagggctgcctgcctccgttcccggcggacgtcttcatgattcctcagtacgggtacctgactctgaacaatggcagtcaggccgtgggccgttcctccttctactgcctggagtactttccttctcaaatgctgagaacgggcaacaactttgagttcagctacacgtttgaggacgtgccttttcacagcagctacgcgcacagccaaagcctggaccggctgatgaaccccctcatcgaccagtacctgtactacctgtctcggactcagaccacgagtggtaccgcaggaaatcggacgttgcaattttctcaggccgggcctagtagcatggcgaatcaggccaaaaactggctacccgggccctgctaccggcagcaacgcgtctccaagacagcgaatcaaaataacaacagcaactttgcctggaccggtgccaccaagtatcatctgaatggcagagactctctggtaaatcccggtcccgctatggcaacccacaaggacgacgaagacaaattttttccgatgagcggagtcttaatatttgggaaacagggagctggaaatagcaacgtggaccttgacaacgttatgataaccagtgaggaagaaattaaaaccaccaacccagtggccacagaacagtacggcacggtggccactaacctgcaatcgtcaaacaccgctcctgctacagggaccgtcaacagtcaaggagccttacctggcatggtctggcagaaccgggacgtgtacctgcagggtcctatctgggccaagattcctcacacggacggacactttcatccctcgccgctgatgggaggctttggactgaaacacccgcctcctcagatcctgattaagaatacacctgttcccgcgaatcctccaactaccttcagtccagctaagtttgcgtcgttcatcacgcagtacagcaccggacaggtcagcgtggaaattgaatgggagctgcagaaagaaaacagcaaacgctggaacccagagattcaatacacttccaactacaacaaatctacaaatgtggactttgctgttgacacaaatggcgtttattctgagcctcgccccatcggcacccgttacctcacccgtaatctgtaa

SEQ ID NO: 3316 - protein, 738 aa, Artificial Sequence; identical to SEQ ID NO: 2395
  Synthetic polypeptide

SEQ ID NO: 3317 - DNA, 2211 bp, Artificial Sequence
  Synthetic polynucleotide
atggctgccgatggttatcttccagattggctcgaggacaacctctctgagggcattcgcgagtggtgggacttgaaacctggagccccgaaacccaaagccaaccagcaaaagcaggacgacggccggggtctggtgcttcctggctacaagtacctcggacccttcaacggactcgacaagggggagcccgtcaacgcggcggacgcagcggccctcgagcacgacaaggcctacgaccagcagctcaaagcgggtgacaatccgtacctgcggtataaccacgccgacgccgagtttcaggagcgtctgcaagaagatacgtcttttgggggcaacctcgggcgagcagtcttccaggccaagaagcgggttctcgaaccttttggtctggttgaggaaggcgctaagacggctcctggaaagaaacgtccggtagagcagtcgccacaagagccagactcctcctcgggcatcggcaagacaggccagcagcccgctaaaaagagactcaattttggtcagactggcgactcagagtcagtccccgacccacaacctctcggagaacctccagcaacccccgctgctgtgggacctactacaatggcttcaggcggtggcgcaccaatggcagacaataacgaaggcgccgacggagtgggtaatgcctcaggaaattggcattgcgattccacatggctgggcgacagagtcatcaccaccagcacccgcacctgggccttgcccacctacaataaccacctctacaagcaaatctccagtgcttcaacgggggccagcaacgacaaccactacttcggctacagcaccccctgggggtattttgatttcaacagattccactgccacttttcaccgcgtgactggcagcgactcatcaacaacaattggggattccggcccaagagactcaacttcaagctcttcaacatccaagtcaaggaggtcacgacgagtgatggcgtcacaaccatcgctaataaccttaccagcacggttcaagtcttctcggactcggagtaccagcttccgtacgtcctcggctctgcgcaccagggctgcctccctccgttcccggcggacgtgttcatgattccgcaatacggctacctgacgctcaacaatggcagccaagccgtgggacgttcatccttttactgcctggaatatttcccttctcagatgctgagaacgggcaacaactttaccttcagctacacctttgaggaagtgcctttccacagcagctacgcgcacagccagagcctggaccggctgatgaatcctctcatcgaccaatacctgtattacctgaacagaactcaaaatcagtccggaagtgcccaaaacaaggacttgctgtttagccgtgggtctccagctggcatgtctgttcagcccaaaaactggctacctggaccctgttatcggcagcagcgcgtttctaaaacaaaaacaggcaacaacaacagcaattttacctggactggtgcttcaaaatataacctcaatgggcatgaatccatcatcaaccctggcactgctatggcctcacacaaagacgacgaagacaagttctttcccatgagcggtgtcatgatttttggaaaagagagcgccggagcttcaaacactgcattggacaatgtcatgattacagacgaagaggaaattaaagccactaaccctgtggccaccgaaagatttgggaccgtggcagtcaatttccagagcagcagcacacaccctgcgaccggagatgtgcatgttatgggagcattacctggcatggtgtggcaagatagagacgtgtacctgcagggtcccatctgggccaaaattcctcacacagatggacactttcacccgtctcctcttatgggcggctttggactcaagcacccgcctcctcagatcctcatcaaaaacacgcctgttcctgcgaatcctccggcggagttttcagctacaaagtttgcttcattcatcacccaatactccacaggacaagtgagtgtggaaattgaatgggagctgcagaaagaaaacagcaagcgctggaatcccgaagtgcagtacacatccaattatgcaaaatctgccaacgttgattttaccgtggacaacaatggactttatactgagcctcgccccattggcacccgttaccttacccgtcccctgtaa

SEQ ID NO: 3318 - DNA, 2211 bp, Artificial Sequence; identical to SEQ ID NO: 3317
  Synthetic polynucleotide

SEQ ID NO: 3319 - DNA, 2202 bp, Artificial Sequence
  Synthetic polynucleotide
atgactgacggttaccttccagattggctagaggacaacctctctgaaggcgttcgagagtggtgggcgctgcaacctggagcccctaaacccaaggcaaatcaacaacatcaggacaacgctcggggtcttgtgcttccgggttacaaatacctcggacccggcaacggacttgacaagggggaacccgtcaacgcagcggacgcggcagccctcgaacacgacaaggcctacgaccagcagctcaaggccggtgacaacccctacctcaagtacaaccacgccgacgccgagtttcaggagcgtcttcaagaagatacgtcttttgggggcaacctcggacgagcagtcttccaggccaaaaagaggatccttgagcctctgggtctggttgaggaagcggctaagacggctcctggaaaaaagagacctgtagagcaatctccagcagaaccggactcctcttcgggcatcggcaaatcaggccagcagcccgctagaaaaagactgaattttggtcagactggcgacacagagtcagtcccagaccctcaaccactcggacaacctcccgcagccccctctggtgtgggatctactacaatggcttcaggcggtggcgcaccaatggcagacaataacgagggtgccgatggagtgggtaattcctcaggaaattggcattgcgattcccaatggctgggcgacagagtcatcaccaccagcacccgcacctgggccctgcccacctacaacaatcacctctacaagcaaatctccagccaatcaggagccaccaacgacaaccactactttggctacagcaccccctgggggtattttgacttcaacagattccactgccacttttcaccacgtgactggcaaagactcatcaacaacaactggggattccgacccaagagactcaacttcaagctctttaacattcaagtcaaagaggtcacgcagaatgacggtacgacgacgattgccaataaccttaccagcacggttcaggtgtttactgactccgagtaccagctcccgtacgtcctcggctcggcgcatcagggatgcctcccgccgttcccagcagacgtcttcatggtcccacagtatggatacctcaccctgaacaacgggagtcaggcggtaggacgctcttccttttactgcctggagtactttccttctcagatgctgcgtactggaaacaactttcagtttagctacacttttgaagacgtgcctttccacagcagctacgctcacagccaaagtctggaccgtctcatgaatcctctgatcgaccagtacctgtactatctgaacaggacacaaacagccagtggaactcagcagtctcggctactgtttagccaagctggacccaccagtatgtctcttcaagctaaaaactggctgcctggaccttgctacagacagcagcgtctgtcaaagcaggcaaacgacaacaacaacagcaactttccctggactggtgccaccaaatatcatctgaatggccgggactcattggtgaacccgggccctgctatggccagtcacaaggatgacaaagaaaagtttttccccatgcatggaaccctgatatttggtaaagaaggaacaaatgccaacaacgcggatttggaaaatgtcatgattacagatgaagaagaaatccgcaccaccaatcccgtggctacggagcagtacgggactgtgtcaaataatttgcaaaactcaaacgctggtccaactactggaactgtcaatcaccaaggagcgttacctggtatggtgtggcaggatcgagacgtgtacctgcagggacccatttgggccaagattcctcacaccgatggacactttcatccttctccactgatgggaggttttgggctcaaacacccgcctcctcagatcatgatcaaaaacactcccgttccagccaatcctcccacaaactttagtgcggcaaagtttgcttccttcatcacacagtactccacggggcaggtcagcgtggagatcgagtgggagctgcagaaggagaacagcaaacgctggaatcccgaaattcagtacacttccaactacaacaaatctgttaatgtggactttactgtggacactaatggtgtgtattcagagcctcgccccattggcaccagatacctgactcgtaatctgtaa

SEQ ID NO: 3320 - DNA, 2211 bp, Artificial Sequence
  Synthetic polynucleotide
atggctgccgatggttatcttccagattggctcgaggacaacctctctgagggcattcgcgagtggtgggacttgaaacctggagccccgaaacccaaagccaaccagcaaaagcaggacgacggccggggtctggtgcttcctggctacaagtacctcggacccttcaacggactcgacaagggggagcccgtcaacgcggcggacgcagcggccctcgagcacgacaaggcctacgaccagcagctcaaagcgggtgacaatccgtacctgcggtataaccacgccgacgccgagtttcaggagcgtctgcaagaagatacgtcttttgggggcaacctcgggcgagcagtcttccaggccaagaagcgggttctcgaaccttttggtctggttgaggaaggcgctaagacggctcctggaaagaaacgtccggtagagcagtcgccacaagagccagactcctcctcgggcatcggcaagacaggccagcagcccgctaaaaagagactcaattttggtcagactggcgactcagagtcagtccccgacccacaacctctcggagaacctccagcaacccccgctgctgtgggacctactacaatggcttcaggcggtggcgcaccaatggcagacaataacgaaggcgccgacggagtgggtaatgcctcaggaaattggcattgcgattccacatggctgggcgacagagtcatcaccaccagcacccgcacctgggccttgcccacctacaataaccacctctacaagcaaatctccagtgcttcaacgggggccagcaacgacaaccactacttcggctacagcaccccctgggggtattttgatttcaacagattccactgccacttttcaccacgtgactggcagcgactcatcaacaacaattggggattccggcccaagagactcaacttcaagctcttcaacatccaagtcaaggaggtcacgacgaatgatggcgtcacaaccatcgctaataaccttaccagcacggttcaagtcttctcggactcggagtaccagcttccgtacgtcctcggctctgcgcaccagggctgcctccctccgttcccggcggacgtgttcatgattccgcaatacggctacctgacgctcaacaatggcagccaagccgtgggacgttcatccttttactgcctggaatatttcccttctcagatgctgagaacgggcaacaactttaccttcagctacacctttgaggaagtgcctttccacagcagctacgcgcacagccagagcctggaccggctgatgaatcctctcatcgaccaatacctgtattacctgaacagaactcaaaatcagtccggaagtgcccaaaacaaggacttgctgtttagccgtgggtctccagctggcatgtctgttcagcccaaaaactggctacctggaccctgttatcggcagcagcgcgtttctaaaacaaaaacagacaacaacaacagcaattttacctggactggtgcttcaaaatataacctcaatgggcgtgaatccatcatcaaccctggcactgctatggcctcacacaaagacgacgaagacaagttctttcccatgagcggtgtcatgatttttggaaaagagagcgccggagcttcaaacactgcattggacaatgtcatgattacagacgaagaggaaattaaagccactaaccctgtggccaccgaaagatttgggaccgtggcagtcaatttccagagcagcagcacagaccctgcgaccggagatgtgcatgttatgggagcattacctggcatggtgtggcaagatagagacgtgtacctgcagggtcccatctgggccaaaattcctcacacagatggacactttcacccgtctcctcttatgggcggctttggactcaagcacccgcctcctcagatcctcatcaaaaacacgcctgttcctgcgaatcctccggcggagttttcagctacaaagtttgcttcattcatcacccaatactccacaggacaagtgagtgtggaaattgaatgggagctgcagaaagaaaacagcaagcgctggaatcccgaagtgcagtacacatccaattatgcaaaatctgccaacgttgattttaccgtggacaacaatggactttatactgagcctcgccccattggcacccgttaccttacccgtcccctgtaa

SEQ ID NO: 3321 - DNA, 2211 bp, Artificial Sequence
  Synthetic polynucleotide
atggctgccgatggttatcttccagattggctcgaggacaacctctctgagggcattcgcaagtggtgggacttgaaacctggagccccgaaacccaaagccaaccagcaaaagcaggacgacggccggggtctggtgcttcctggctacaagtacctcggacccttcaacggactcgacaagggggagcccgtcaacgcggcggacgcagcggccctcgagcacgacaaggcctacgaccagcagctcaaagcgggtgacaatccgtacctgcggtataaccacgccgacgccgagtttcaggagcgtctgcaagaagatacgtcttttgggggcaacctcgggagagcagtcttccaggccaagaagcgggttctcgaaccttttggtctggttgaggaaggcgctaagacggctcctggaaagaaacgtccggtagagcagtcgccacaagagccagactcctcctcgggcatcggcaagacaggccagcagcccgctaaaaagagactcaattttggtcagactggcgactcagagtcagtccccgacccacaacctctcggagaacctccagcaacccccgctgctgtgggacctactacaatggcttcaggcggtggcgcaccaatggcagacaataacgaaggcgccgacggagtgggtaatgcctcaggaaattggcattgcgattccacatggctgggcgacagagtcatcaccaccagcacccgcacctgggccttgcccacctacaataaccacctctacaagcaaatctccagtgcttcaacgggggccagcaacgacaaccactacttcggctacagcaccccctgggggtattttgatttcaacagattccactgccacttttcaccacgtgactggcagcgactcatcaacaacaattggggattccggcccaagagactcaacttcaagctcttcaacatccaagtcaaggaggtcacgacgaatgatggcgtcacaaccatcgctaataaccttaccagcacggttcaagtcttctcggactcggagtaccagcttccgtacgtcctcggctctgcgcaccagggctgcctccctccgttcccggcggacgtgttcatgattccgcaatacggctacctgacgctcaacaatggcagccaagccgtgggacgttcatccttttactgcctggaatatttcccttctcagatgctgagaacgggcaacaactttaccttcagctacacctttgaggaagtgcctttccacagcagctacgcgcacagccagagcctggaccggctgatgaatcctctcatcgaccaatacctgtattacctgaacagaactcaaaatcagtccggaagtgcccaaaacaaggacttgctgtttagccgtgggtctccagctggcatgtctgttcagcccaaaaactggctacctggaccctgttatcggcagcagcgcgtttctaaaacaaaaacagacaacaacaacagcaattttacctggactggtgcttcaaaatataacctcaatgggcgtgaatccatcatcaaccctggcactgctatggcctcacacaaagacgacaaagacaagttctttcccatgagcggtgtcatgatttttggaaaagagagcgccggagcttcaaacactgcattggacaatgtcatgattacagacgaagaggaaattaaagccactaaccctgtggccaccgaaagatttgggaccgtggcagtcaatttccagagcagcagcacagaccctgcgaccggagatgtgcatgttatgggagcattacctggcatggtgtggcaagatagagacgtgtacctgcagggtcccatttgggccaaaattcctcacacagatggacactttcacccgtctcctcttatgggcggctttggactcaagcacccgcctcctcagatcctcatcaaaaacacacctgttcctgcgaatcctccggcggagttttcagctacaaagtttgcttcattcatcacccaatactccacaggacaagtgagtgtggaaattgaatgggagctgcagaaagaaaacagcaagcgctggaatcccgaagtgcagtacacatccaattatgcaaaatctgccaacgttgattttaccgtggacaacaatggactttatactgagcctcgccccattggcacccgttaccttacccgtcccctgtaa

SEQ ID NO: 3322 - DNA, 2211 bp, Artificial Sequence
  Synthetic polynucleotide
atggctgccgatggttatcttccagattggctcgaggacaacctctctgagggcattcgcgagtggtgggacttgaaacctggagccccgaaacccaaagccaaccagcaaaagcaggacaacggccggggtctggtgcttcctggctacaagtacctcggacccttcaacggactcgacaagggggagcccgtcaacgcggcggacgcagcggccctcgagcacgacaaggcctacgaccagcagctcaaagcgggtgacaatccgtacctgcggtataaccacgccgacgccgagtttcaggagcgtctgcaagaagatacgtcttttgggggcaacctcgggcgagcagtcttccaggccaagaagcgggttctcgaaccttttggtctggttgaggaaggcgctaagacggctcctggaaagaaacgtccggtagagcagtcgccacaagagccagactcctcctcgggcatcggcaagacaggccagcagcccgctaaaaagagactcaattttggtcagactggcgactcagagtcagtccccgacccacaacctctcggagaacctccagcaacccccgctgctgtgggacctactacaatggcttcaggcggtggcgcaccaatggcagacaataacgaaggcgccgacggagtgggtaatgcctcaggaaattggcattgcgattccacatggctgggcgacagagtcatcaccaccagcacccgcacctgggccttgcccacctacaataaccacctctacaagcaaatctccagtgcttcaacgggggccagcaacgacaaccactacttcggctacagcaccccctgggggtattttgatttcaacagattccactgccacttttcaccacgtgactggcagcgactcatcaacaacaattggggattccggcccaagagactcaacttcaagctcttcaacatccaagtcaaggaggtcacgacgaatgatggcgtcacaaccatcgctaataaccttaccagcacggttcaagtcttctcggactcggagtaccagcttccgtacgtcctcggctctgcgcaccagggctgcctccctccgttcccggcggacgtgttcatgattccgcaatacggctacctgacgctcaacaatggcagccaagccgtgggacgttcatccttttactgcctggaatatttcccttctcagatgctgagaacgggcaacaactttaccttcagctacacctttgaggaagtgcctttccacagcagctacgcgcacagccagagcctggaccggctgatgaatcctctcatcgaccaatacctgtattacctgaacagaactcaaaatcagtccggaagtgcccaaaacaaggacttgctgtttagccgtgggtctccagctggcatgtctgttcagcccaaaaactggctacctggaccctgttatcggcagcagcgcgtttctaaaacaaaaacagacaacaacaacagcaattttacctggactggtgcttcaaaatataacctcaatgggcgtgaatccatcatcaaccctggcactgctatggcctcacacaaagacgacgaagacaagttctttcccatgagcggtgtcatgatttttggaaaagagagcgccggagcttcaaacactgcattggacaatgtcatgattacagacgaagaggaaattaaagccactaaccctgtggccaccgaaagatttgggaccgtggcagtcaatttccagagcagcagcacacaccctgcgaccggagatgtgcatgttatgggagcattacctggcatggtgtggcaagatagagacgtgtacctgcagggtcccatctgggccaaaattcctcacacagatggacactttcacccgtctcctcttatgggcggctttggactcaagcacccgcctcctcagatcctcatcaaaaacacgcctgttcctgcgaatcctccggcggagttttcagctacaaagtttgcttcattcatcacccaatactccacaggacaagtgagtgtggaaattgaatgggagctgcagaaagaaaacagcaagcgctggaatcccgaagtgcagtacacatccaattatgcaaaatctgccaacgttgattttaccgtggacaacaatggactttatactgagcctcgccccattggcacccgttaccttacccgtcccctgtaa

SEQ ID NO: 3323 - DNA, 2211 bp, Artificial Sequence
  Synthetic polynucleotide
atggctgccgatggttatcttccagattggctcgaggacaacctctctgagggcattcgcgagtggtgggacttgaaacctggagccccgaaacccaaagccaaccagcaaaagcaggacgacggccggggtctggtgcttcctggctacaagtacctcggacccttcaacggactcgacaagggggagcccgtcaacgcggcggacgcagcggccctcgagcacgacaaggcctacgaccagcagctcaaagcgggtgacaatccgtacctgcggtataaccacgccgacgccgagtttcaggagcgtctgcaagaagatacgtcttttgggggcaacctcgggcgagcagtcttccaggccaaaaagcgggttctcgaaccttttggtctggttgaggaaggcgctaagacggctcctggaaagaaacgtccggtagagcagtcgccacaagagccagactcctcctcgggcatcggcaagacaggccagcagcccgctaaaaagagactcaattttggtcagactggcgactcagagtcagtccccgacccacaacctctcggagaacctccagcaacccccgctgctgtgggacctactacaatggcttcaggcggtggcgcaccaatggcagacaataacgaaggcgccgacggagtgggtaatgcctcaggaaattggcattgcgattccacatggctgggcgacagagtcatcaccaccagcacccgcacctgggccttgcccacctacaataaccacctctacaagcaaatctccagtgcttcaacgggggccagcaacgacaaccactacttcggctacagcaccccctgggggtattttgatttcaacagattccactgccacttttcaccacgtgactggcagcgactcatcaacaacaattggggattccggcccaagagactcaacttcaagctcttcaacatccaagtcaaggaggtcacgacgaatgatggcgtcacaaccatcgctaataaccttaccagcacggttcaagtcttctcggactcggagtaccagcttccgtacgtcctcggctctgcgcaccagggctgcctccctccgttcccggcggacgtgttcatgattccgcaatacggctacctgacgctcaacaatggcagccaagccgtgggacgttcatccttttattgcctggaatatttcccatcgcagatgctgagaacgggcaataactttaccttcagctacacctttgaggacgtgcctttccacagcagctacgcgcacagccagagcctggaccggctgatgaatcctctcatcgaccagtacctgtattacctgaacagaactcagaaccagtccggaagtgcccaaaacaaggacttgctgtttagccgggggtctccagctggcatgtctgttcagctcaaaaactggctacctggaccctgttatcggcagcagcgcgtttctaaaacaaaaacagacaacaacaacagcaattttacctggactggtgcttcaaaatataaccttaatgggcgtgaatccatcatcaaccctggcactgctatggcctcacacaaagacgacgaagacaagttctttcccatgagcggtgtcatgatttttggaaaagagagcgccggagcttcaaacactgcattggacaatgtcatgattacagacgaagaggaaattaaagccactaaccctgtggccaccgaaagatttgggaccgtggcagtcaatttccagagcagcagcacagaccctgcgaccggagatgtgcatgttatgggagcattacctggcatggtgtggcaagatagagacgtgtacctgcagggtcccatttgggccaaaattcctcacacagatggacactttcacccgtctcctcttatgggcggctttggactcaaacacccgcctcctcagatcctcatcaaaaacacacctgttcctgcgaatcctccggcggagttttcagctacaaagtttgcttcattcatcacccaatactccacaggacaagtgagcgtggaaattgaatgggagctgcagaaagaaaacagcaagcgctggaatcccgaagtgcagtacacatccaattatgcaaaatctgccaacgttgattttaccgtggacaacaatggactttatactgagcctcgccccattggcacccgttaccttacccgtcccctgtaa

SEQ ID NO: 3324 - DNA, 2211 bp, Artificial Sequence
  Synthetic polynucleotide
atggctgccgatggttatcttccagattggctcgaggacaacctctctgagggcattcgcgagtggtgggacttgaaacctggagccccgaaacccaaagccaaccagcaaaagcaggacgacggccggggtctggtgcttcctggctacaagtacctcggacccttcaacggactcgacaagggggagcccgtcaacgcggcggacgcagcggccctcgagcacgacaaggcctacgaccagcagctcaaagcgggtgacaatccgtacctgcggtataaccacgccgacgccgagtttcaggagcgtctgcaagaagatacgtcttttgggggcaacctcgggcgagcagtcttccaggccaagaagcgggttctcgaaccttttggtctggttgaggaaggtgctaagacggctcctggaaagaagagaccggtagagcagtcgccccaagaaccagactcctcatcgggcatcggcaaatcaggccagcagcccgctaaaaagagactcaattttggtcagactggcgactcagagtcagtccccgacccacaacctctcggagaacctccagcaacccccgctgctgtgggacctactacaatggcttcaggcggtggcgcaccaatggcagacaataacgaaggcgccgacggagtgggtaatgcctcaggaaattggcattgcgattccacatggctgggcgacagagtcattaccaccagcacccgaacctgggccctgcccacctataacaaccacctctacaaacaaatctccagcgcttcaacgggggccagcaacgacaaccactacttcggctacagcaccccctgggggtattttgattttaacagattccactgccacttctcaccacgtgactggcagcgactcatcaacaacaattggggattccggcccaagagactcaacttcaagctcttcaacatccaagtcaaggaggtcacgacgaacgatggcgtcacgaccatcgctaataaccttaccagcacggttcaagtcttctcggactcggagtaccagttgccgtacgtcctcggctctgcgcaccagggctgcctccctccgttcccggcggacgtgttcatgattccgcagtacggctacctaacactcaacaatggcagccaggccgtgggacgttcatccttttactgcctggaatatttcccatcgcagatgctgagaacgggcaataactttaccttcagctacacattcgaggacgtgcctttccacagcagctacgcgcacagccaaagcctggaccggctgatgaatcctctcatcgaccagtacttgtattacctaaacagaactcaaaatcagtccggaagtgcccaaaacaaggacttgctgtttagccgggggtctccagctggcatgtctgttcagcccaaaaactggctacctggaccctgttatcggcagcagcgcgtttctaaaacaaaaacagacaacaacaacagcaactttacctggactggtgcttcaaaatataaccttaatgggcgtgaatctataatcaaccctggcactgctatggcttcacacaaagacgacgaagacaagttctttccaatgagcggtgtcatgatttttggcaaggagagcgccggagcttcaaacactgcattggacaatgtcatgattacagacgaagaggaaattaaagccactaaccctgtggccaccgaaagatttgggaccgtggcagtcaatttccagagcagcagcacagaccctgcgaccggagatgtgcatgttatgggagcattacctggcatggtgtggcaagatagagacgtgtacctgcagggtccaatttgggccaaaattcctcacacagatggacactttcacccgtctcctcttatgggcggctttggacttaagcacccgcctcctcagatcctcatcaaaaacacgcctgttcctgcgaatcctccggcagagttttcggctacaaagtttgcttcattcatcacccagtattccacaggacaagtgagtgtggaaattgaatgggagttgcagaaagaaaacagcaagcgttggaatcccgaagtgcagtacacatctaattatgcaaaatctgccaacgttgatttcactgtggacaacaatggactttatactgagcctcgccccattggcacccgttacctcacccgtcccctgtaa

SEQ ID NO: 3325 - DNA, 2211 bp, Artificial Sequence
  Synthetic polynucleotide
atggctgccgatggttatcttccagattggctcgaggacaacctctctgagggcattcgcgagtggtgggacttgaaacctggagccccgaaacccaaagccaaccagcaaaagcaggacgacggccggggtctggtgcttcctggctacaagtacctcggacccttcaacggactcgacaagggggagcccgtcaacgcggcggacgcagcggccctcgagcacgacaaggcctacgaccagcagctcaaagcgggtgacaatccgtacctgcggtataaccacgccgacgccgagtttcaggagcgtctgcaagaagatacgtcttttgggggcaacctcgggcgagcagtcttccaggccaagaagagggttctcgaaccttttggtctggttgaggaaggtgctaagacggctcctggaaagaaacgtccggtagagcagtcaccccaagaaccagactcctcctcgggcattggcaaatcaggccagcagcccgctaaaaagagactcaattttggtcagactggcgactcagagtcagtccccgacccacaacctctcggagaacctccagcaacccccgctgctttgggacctactacaatggcttcaggcggtggcgcaccaatggcagacaataacgaaggcgccgacggagtgggtaatgcctcaggaaattggcattgcgattccacatggctgggcgacagagtcatcaccaccagcacccgcacctgggccttgcccacctacaataaccacctctacaagcaaatctccagtgcttcaacgggggccagcaacgacaaccactacttcggctacagcaccccctgggggtattttgatttcaacagattccactgccatttctcaccacgtgactggcagcgactcatcaacaacaactggggattccggcccaagagactcaacttcaagctcttcaacatccaagtcaaggaggtcacgacgaacgatggcgtcacgaccatcgctaataaccttaccagcacggttcaagtcttctcggactcggagtaccagcttccgtacgtcctcggctctgcgcaccagggctgcctccctccgttcccggcggacgtgttcatgattccgcagtacggctacctgacgctcaacaatggcagcaaagccgtgggacgttcatccttttactgcctggaatatttcccttctcagatgctgagaacgggcaacaactttaccttcagctacacctttgaggaagtgcctttccacagcagctacgcgcacagccagagcctggaccggctgatgaatcctctcatcgaccaatacctgtattacctgaacagaactcaaaatcagtccggaagtgcccaaaacaaggacttgctgtttagccgtgggtctccagctggcatgtctgttcagcccaaaaactggctacctggaccctgttatcggcagcagcgcgtttctaaaacaaaaacagacaacaacaacagcaattttacctggactggtgcttcaaaatataacctcaatgggcgtgaatccatcatcaaccctggcactgctatggcctcacacaaagacgacgaagacaagttctttcccatgagcggtgtcatgatttttggaaaagagagcgccggagcttcaaacactgcattggacaatgtcatgattacagacgaagaggaaattaaagccactaaccctgtggccaccgaaagatttgggaccgtggcagtcaatttccagagcagcagcacagaccctgcgaccggagatgtgcatgttatgggagcattacctggcatggtgtggcaagatagagacgtgtacctgcagggtcccatttgggccaaaattcctcacacggatggacactttcacccgtctcctcttatgggcggctttggactcaagcacccgcctcctcagatcctcatcaaaaacacacctgttcctgcgaatcctccggcagagttttcggctacaaagtttgcttcattcatcacccagtactccacaggacaagtgagcgtggaaattgaatgggagttgcagaaagaaaacagtaagcgctggaatcccgaagtgcagtacacatctaattatgcaaaatctgccaacgttgacttcactgtggacaacaatggactttatactgagcctcgccccattggcacccgttacctcacccgtcccctgtaa

SEQ ID NO: 3326 - DNA, 2970 bp, Artificial Sequence
  Synthetic polynucleotide
agatgaccgccaaggtcgtagagtccgccaaggccattctgggcggcagcaaggtgcgcgtggaccaaaaatgcaaggcctctgcgcagatcgaccccacccccgtgatcgtcacctccaacaccaacatgtgcgccgtgattgacgggaacagcaccaccttcgagcaccagcagcccctgcaggaccggatgttcaagtttgaactcacccgccgcctcgactacgactttggcaaggtcaccaagcaggaagtcaaggactttttccggtgggcggctgatcacgtgactgacgtggctcatgagttttacgtcacaaagggtggagctaagaaaaggcccgccccctctgacgaggatataagcgagcccaagcggccgcgcgtgtcatttgcgcagccggagacgtcagacgcggaagctcccggagacttcgccgacaggtaccaaaacaaatgttctcgtcacgcgggtatgctgcagatgctctttccctgcaagacgtgcgagagaatgaatcagaattccaacgtctgcttcacgcacggtcagaaagattgcggggagtgctttcccgggtcagaatctcaaccggtttctgtcgtcagaaaaacgtatcagaaactgtgcatccttcatcagctccggggggcacccgagatcgcctgctctgcttgcgaccaactcaaccccgatttggacgattgccaatttgagcaataaatgactgaaatcaggtatggctgctgacggttatcttccagattggctcgaggacaacctctctgaaggcattcgcgagtggtgggcgctgaaacctggagctccacaacccaaggccaaccaacagcatcaggacaacggcaggggtcttgtgcttcctgggtacaagtacctcggacccttcaacggactcgacaagggagagccggtcaacgaggcagacgccgcggccctcgagcacgacaaggcctacgacaagcagctcgagcagggggacaacccgtatctcaagtacaaccacggcgacgccgagttccagcagcgcttggcgaccgacacctcttttgggggcaacctcgggcgagcagtcttccaggccaaaaagaggattctcgagcctctgggtctggttgaagagggcgttaaaacggctcctggaaagaaacgcccattagaaaagactccaaatcggccgaccaacccggactctgggaaggccccggccaagaaaaagcaaaaagacggcgaaccagccgactctgctagaaggacactcgactttgaagactctggagcaggagacggaccccctgagggatcatcttccggagaaatgtctcatgatgctgagatgcgtgcggcgccaggcggaaatgctgtcgaggcgggacaaggtgccgatggagtgggtaatgcctccggtgattggcattgcgattccacctggtcagagggccgagtcaccaccaccagcacccgaacctgggtcctacccacgtacaacaaccacctgtacctgcgaatcggaacaacggccaacagcaacacctacaacggattctccaccccctggggatactttgactttaaccgcttccactgccacttttccccacgcgactggcagcgactcatcaacaacaactggggactcaggccgaaatcgatgcgtgttaaaatcttcaacatacaggtcaaggaggtcacgacgtcaaacggcgagactacggtcgctaataaccttaccagcacggttcagatctttgcggattcgacgtatgaactcccatacgtgatggacgccggtcaggaggggagctttcctccgtttcccaacgacgtctttatggttccccaatacggatactgcggagttgtcactggaaaaaaccagaaccagacagacagaaatgccttttactgcctggaatactttccatcccaaatgctaagaactggcaacaattttgaagtcagttaccaatttgaaaaagttcctttccattcaatgtacgcgcacagccagagcctggacagaatgatgaatcctttactggatcagtacctgtggcatctgcaatcgaccactaccggaaattcccttaatcaaggaacagctaccaccacgtacgggaaaattaccactggagactttgcctactacaggaaaaactggttgcctggagcctgcattaaacaacaaaaattttcaaagaatgccaatcaaaactacaagattcccgccagcgggggagacgcccttttaaagtatgacacgcataccactctaaatgggcgatggagtaacatggctcctggacctccaatggcaaccgcaggtgccggggactcggattttagcaacagccagctgatctttgccggacccaatccgagcggtaacacgaccacatcttcaaacaatttgttgtttacctcagaagaggagattgccacaacaaacccacgagacacggacatgtttggacagattgcagataataatcaaaatgccaccaccgcccctcacatcgctaacctggacgctatgggaattgttcccggaatggtctggcaaaacagagacatctactaccagggccctatttgggccaaggtccctcacacggacggacactttcacccttcgccgctgatgggaggatttggactgaaacacccgcctccacagattttcatcaaaaacacccccgtacccgccaatcccaatactacctttagcgctgcaaggattaattcttttctgacgcagtacagcaccggacaagttgccgttcagatcgactgggaaattcagaaggagcattccaaacgctggaatcccgaagttcaatttacttcaaactacggcactcaaaattctatgctgtgggctcccgacaatgctggcaactaccacgaactccgggctattgggtcccgtttcctcacccaccacttgtaa

SEQ ID NO: 3327 - protein, 736 aa, Artificial Sequence
  Synthetic polypeptide
MAADGYLPDWLEDNLSEGIREWWDLKPGAPKPKANQQKQDDGRGLVLPGYKYLGPFNGLDKGEPVNAADAAALEHDKAYDQQLKAGDNPYLRYNHADAEFQERLQEDTSFGGNLGRAVFQAKKRVLEPFGLVEEGAKTAPGKKRPVEQSPQEPDSSSGIGKTGQQPAKKRLNFGQTGDSESVPDPQPLGEPPATPAAVGPTTMASGGGAPMADNNEGADGVGNASGNWHCDSTWLGDRVITTSTRTWALPTYNNHLYKQISSASTGASNDNHYFGYSTPWGYFDFNRFHCHFSPRDWQRLINNNWGFRPKRLNFKLFNIQVKEVTTSDGVTTIANNLTSTVQVFSDSEYQLPYVLGSAHQGCLPPFPADVFMIPQYGYLTLNNGSQAVGRSSFYCLEYFPSQMLRTGNNFTFSYTFEEVPFHSSYAHSQSLDRLMNPLIDQYLYYLNRTQNQSGSAQNKDLLFSRGSPAGMSVQPKNWLPGPCYRQQRVSKTKTGNNNSNFTWTGASKYNLNGHESIINPGTAMASHKDDEDKFFPMSGVMIFGKESAGASNTALDNVMITDEEEIKATNPVATERFGTVAVNFQSSSTHPATGDVHVMGALPGMVWQDRDVYLQGPIWAKIPHTDGHFHPSPLMGGFGLKHPPPQILIKNTPVPANPPAEFSATKFASFITQYSTGQVSVEIEWELQKENSKRWNPEVQYTSNYAKSANVDFTVDNNGLYTEPRPIGTRYLTRPL

SEQ ID NO: 3328 - protein, 736 aa, Artificial Sequence; identical to SEQ ID NO: 3327
  Synthetic polypeptide

SEQ ID NO: 3329 - protein, 733 aa, Artificial Sequence
  Synthetic polypeptide
MTDGYLPDWLEDNLSEGVREWWALQPGAPKPKANQQHQDNARGLVLPGYKYLGPGNGLDKGEPVNAADAAALEHDKAYDQQLKAGDNPYLKYNHADAEFQERLQEDTSFGGNLGRAVFQAKKRILEPLGLVEEAAKTAPGKKRPVEQSPAEPDSSSGIGKSGQQPARKRLNFGQTGDTESVPDPQPLGQPPAAPSGVGSTTMASGGGAPMADNNEGADGVGNSSGNWHCDSQWLGDRVITTSTRTWALPTYNNHLYKQISSQSGATNDNHYFGYSTPWGYFDFNRFHCHFSPRDWQRLINNNWGFRPKRLNFKLFNIQVKEVTQNDGTTTIANNLTSTVQVFTDSEYQLPYVLGSAHQGCLPPFPADVFMVPQYGYLTLNNGSQAVGRSSFYCLEYFPSQMLRTGNNFQFSYTFEDVPFHSSYAHSQSLDRLMNPLIDQYLYYLNRTQTASGTQQSRLLFSQAGPTSMSLQAKNWLPGPCYRQQRLSKQANDNNNSNFPWTGATKYHLNGRDSLVNPGPAMASHKDDKEKFFPMHGTLIFGKEGTNANNADLENVMITDEEEIRTTNPVATEQYGTVSNNLQNSNAGPTTGTVNHQGALPGMVWQDRDVYLQGPIWAKIPHTDGHFHPSPLMGGFGLKHPPPQIMIKNTPVPANPPTNFSAAKFASFITQYSTGQVSVEIEWELQKENSKRWNPEIQYTSNYNKSVNVDFTVDTNGVYSEPRPIGTRYLTRNL

SEQ ID NO: 3330 - protein, 736 aa, Artificial Sequence; identical to SEQ ID NO: 3145
  Synthetic polypeptide

SEQ ID NO: 3331 - protein, 736 aa, Artificial Sequence
  Synthetic polypeptide
MAADGYLPDWLEDNLSEGIRKWWDLKPGAPKPKANQQKQDDGRGLVLPGYKYLGPFNGLDKGEPVNAADAAALEHDKAYDQQLKAGDNPYLRYNHADAEFQERLQEDTSFGGNLGRAVFQAKKRVLEPFGLVEEGAKTAPGKKRPVEQSPQEPDSSSGIGKTGQQPAKKRLNFGQTGDSESVPDPQPLGEPPATPAAVGPTTMASGGGAPMADNNEGADGVGNASGNWHCDSTWLGDRVITTSTRTWALPTYNNHLYKQISSASTGASNDNHYFGYSTPWGYFDFNRFHCHFSPRDWQRLINNNWGFRPKRLNFKLFNIQVKEVTTNDGVTTIANNLTSTVQVFSDSEYQLPYVLGSAHQGCLPPFPADVFMIPQYGYLTLNNGSQAVGRSSFYCLEYFPSQMLRTGNNFTFSYTFEEVPFHSSYAHSQSLDRLMNPLIDQYLYYLNRTQNQSGSAQNKDLLFSRGSPAGMSVQPKNWLPGPCYRQQRVSKTKTDNNNSNFTWTGASKYNLNGRESIINPGTAMASHKDDKDKFFPMSGVMIFGKESAGASNTALDNVMITDEEEIKATNPVATERFGTVAVNFQSSSTDPATGDVHVMGALPGMVWQDRDVYLQGPIWAKIPHTDGHFHPSPLMGGFGLKHPPPQILIKNTPVPANPPAEFSATKFASFITQYSTGQVSVEIEWELQKENSKRWNPEVQYTSNYAKSANVDFTVDNNGLYTEPRPIGTRYLTRPL

SEQ ID NO: 3332 - protein, 736 aa, Artificial Sequence
  Synthetic polypeptide
MAADGYLPDWLEDNLSEGIREWWDLKPGAPKPKANQQKQDNGRGLVLPGYKYLGPFNGLDKGEPVNAADAAALEHDKAYDQQLKAGDNPYLRYNHADAEFQERLQEDTSFGGNLGRAVFQAKKRVLEPFGLVEEGAKTAPGKKRPVEQSPQEPDSSSGIGKTGQQPAKKRLNFGQTGDSESVPDPQPLGEPPATPAAVGPTTMASGGGAPMADNNEGADGVGNASGNWHCDSTWLGDRVITTSTRTWALPTYNNHLYKQISSASTGASNDNHYFGYSTPWGYFDFNRFHCHFSPRDWQRLINNNWGFRPKRLNFKLFNIQVKEVTTNDGVTTIANNLTSTVQVFSDSEYQLPYVLGSAHQGCLPPFPADVFMIPQYGYLTLNNGSQAVGRSSFYCLEYFPSQMLRTGNNFTFSYTFEEVPFHSSYAHSQSLDRLMNPLIDQYLYYLNRTQNQSGSAQNKDLLFSRGSPAGMSVQPKNWLPGPCYRQQRVSKTKTDNNNSNFTWTGASKYNLNGRESIINPGTAMASHKDDEDKFFPMSGVMIFGKESAGASNTALDNVMITDEEEIKATNPVATERFGTVAVNFQSSSTHPATGDVHVMGALPGMVWQDRDVYLQGPIWAKIPHTDGHFHPSPLMGGFGLKHPPPQILIKNTPVPANPPAEFSATKFASFITQYSTGQVSVEIEWELQKENSKRWNPEVQYTSNYAKSANVDFTVDNNGLYTEPRPIGTRYLTRPL

SEQ ID NO: 3333 - protein, 736 aa, Artificial Sequence
  Synthetic polypeptide
MAADGYLPDWLEDNLSEGIREWWDLKPGAPKPKANQQKQDDGRGLVLPGYKYLGPFNGLDKGEPVNAADAAALEHDKAYDQQLKAGDNPYLRYNHADAEFQERLQEDTSFGGNLGRAVFQAKKRVLEPFGLVEEGAKTAPGKKRPVEQSPQEPDSSSGIGKTGQQPAKKRLNFGQTGDSESVPDPQPLGEPPATPAAVGPTTMASGGGAPMADNNEGADGVGNASGNWHCDSTWLGDRVITTSTRTWALPTYNNHLYKQISSASTGASNDNHYFGYSTPWGYFDFNRFHCHFSPRDWQRLINNNWGFRPKRLNFKLFNIQVKEVTTNDGVTTIANNLTSTVQVFSDSEYQLPYVLGSAHQGCLPPFPADVFMIPQYGYLTLNNGSQAVGRSSFYCLEYFPSQMLRTGNNFTFSYTFEDVPFHSSYAHSQSLDRLMNPLIDQYLYYLNRTQNQSGSAQNKDLLFSRGSPAGMSVQLKNWLPGPCYRQQRVSKTKTDNNNSNFTWTGASKYNLNGRESIINPGTAMASHKDDEDKFFPMSGVMIFGKESAGASNTALDNVMITDEEEIKATNPVATERFGTVAVNFQSSSTDPATGDVHVMGALPGMVWQDRDVYLQGPIWAKIPHTDGHFHPSPLMGGFGLKHPPPQILIKNTPVPANPPAEFSATKFASFITQYSTGQVSVEIEWELQKENSKRWNPEVQYTSNYAKSANVDFTVDNNGLYTEPRPIGTRYLTRPL

SEQ ID NO: 3334 - protein, 736 aa, Artificial Sequence
  Synthetic polypeptide
MAADGYLPDWLEDNLSEGIREWWDLKPGAPKPKANQQKQDDGRGLVLPGYKYLGPFNGLDKGEPVNAADAAALEHDKAYDQQLKAGDNPYLRYNHADAEFQERLQEDTSFGGNLGRAVFQAKKRVLEPFGLVEEGAKTAPGKKRPVEQSPQEPDSSSGIGKSGQQPAKKRLNFGQTGDSESVPDPQPLGEPPATPAAVGPTTMASGGGAPMADNNEGADGVGNASGNWHCDSTWLGDRVITTSTRTWALPTYNNHLYKQISSASTGASNDNHYFGYSTPWGYFDFNRFHCHFSPRDWQRLINNNWGFRPKRLNFKLFNIQVKEVTTNDGVTTIANNLTSTVQVFSDSEYQLPYVLGSAHQGCLPPFPADVFMIPQYGYLTLNNGSQAVGRSSFYCLEYFPSQMLRTGNNFTFSYTFEDVPFHSSYAHSQSLDRLMNPLIDQYLYYLNRTQNQSGSAQNKDLLFSRGSPAGMSVQPKNWLPGPCYRQQRVSKTKTDNNNSNFTWTGASKYNLNGRESIINPGTAMASHKDDEDKFFPMSGVMIFGKGSAGASNTALDNVMITDEEEIKATNPVATERFGTVAVNFQSSSTDPATGDVHVMGALPGMVWQDRDVYLQGPIWAKIPHTDGHFHPSPLMGGFGLKHPPPQILIKNTPVPANPPAEFSATKFASFITQYSTGQVSVEIEWELQKENSKRWNPEVQYTSNYAKSANVDFTVDNNGLYTEPRPIGTRYLTRPL

SEQ ID NO: 3335 - protein, 736 aa, Artificial Sequence; identical to SEQ ID NO: 3076
  Synthetic polypeptide

SEQ ID NO: 3336 - protein, 742 aa, Artificial Sequence
  Synthetic polypeptide
MAADGYLPDWLEDNLSEGIREWWALKPGAPQPKANQQHQDNGRGLVLPGYKYLGPFNGLDKGEPVNEADAAALEHDKAYDKQLEQGDNPYLKYNHADAEFQQRLATDTSFGGNLGRAVFQAKKRILEPLGLVEEGVKTAPGKKRPLEKTPNRPTNPDSGKAPAKKKQKDGEPADSARRTLDFEDSGAGDGPPEGSSSGEMSHDAEMRAAPGGNAVEAGQGADGVGNASGDWHCDSTWSEGRVTTTSTRTWVLPTYNNHLYLRIGTTANSNTYNGFSTPWGYFDFNRFHCHFSPRDWQRLINNNWGLRPKSMRVKIFNIQVKEVTTSNGETTVANNLTSTVQIFADSTYELPYVMDAGQEGSFPPFPNDVFMVPQYGYCGVVTGKNQNQTDRNAFYCLEYFPSQMLRTGNNFEVSYQFEKVPFHSMYAHSQSLDRMMNPLLDQYLWHLQSTTTGNSLNQGTATTTYGKITTGDFAYYRKNWLPGACIKQQKFSKNANQNYKIPASGGDALLKYDTHTTLNGRWSNMAPGPPMATAGAGDSDFSNSQLIFAGPNPSGNTTTSSNNLLFTSEEEIATTNPRDTDMFGQIADNNQNATTAPHIANLDAMGIVPGMVWQNRDIYYQGPIWAKVPHTDGHFHPSPLMGGFGLKHPPPQIFIKNTPVPANPNTTFSAARINSFLTQYSTGQVAVQIDWEIQKEHSKRWNPEVQFTSNYGTQNSMLWAPDNAGNYHELRAIGSRFLTHHL

SEQ ID NO: 3337 - DNA, 2211 bp, Artificial Sequence
  Synthetic polynucleotide
atggctgccgatggttatcttccagattggctcgaggacaacctctctgagggcattcgcgagtggtgggacttgaaacctggagccccgaagcccaaagccaaccagcaaaagcaggacgacggccggggtctggtgcttcctggctacaagtacctcggacccttcaacggactcgacaagggggagcccgtcaacgcggcggacgcagcggccctcgagcacgacaaggcctacgaccagcagctcaaagcgggtgacaatccgtacctgcggtataaccacgccgacgccgagtttcaggagcgtctgcaagaagatacgtcttttgggggcaacctcgggcgagcagtcttccaggccaagaagcgggttctcgaacctctcggtctggttgaggaaggcgctaaggcggctcctggaaagaaacgtccggtagagcagtcgccacaagagccagactcctcctcgggcatcggcaagacaggccagcagcccgctaaaaagagactcaattttggtcagactggcgactcagagtcagtccccgatccacaacctctcggagaacctccagcagccccctcaggtctgggacctaatacaatggcttcaggcggtggcgctccaatggcagacaataacgaaggcgccgacggagtgggtaattcctcgggaaattggcattgcgattccacatggctgggggacagagtcatcaccaccagcacccgaacctgggccctgcccacctacaacaaccacctctacaagcaaatctccaacggcacctcgggaggaagcaccaacgacaacacctattttggctacagcaccccctgggggtattttgacttcaacagattccactgtcacttttcaccacgtgactggcaacgactcatcaacaacaattggggattccggcccaaaagactcaacttcaagctgttcaacatccaggtcaaggaagtcacgacgaacgaaggcaccaagaccatcgccaataatctcaccagcaccgtgcaggtctttacggactcggagtaccagttaccgtacgtgctaggatccgctcaccagggatgtctgcctccgttcccggcggacgtcttcatggttcctcagtacggctatttaactttaaacaatggaagccaagccctgggacgttcctccttctactgtctggagtatttcccatcgcagatgctgagaaccggcaacaactttcagttcagctacaccttcgaggacgtgcctttccacagcagctacgcgcacagccagagcctggacaggctgatgaatcccctcatcgaccagtacctgtactacctggtcagaacgcaaacgactggaactggagggacgcagactctggcattcagccaagcgggtcctagctcaatggccaaccaggctagaaattgggtgcccggaccttgctaccggcagcagcgcgtctccacgacaaccaaccagaacaacaacagcaactttgcctggacgggagctgccaagtttaagctgaacggccgagactctctaatgaatccgggcgtggcaatggcttcccacaaggatgacgacgaccgcttcttcccttcgagcggggtcctgatttttggcaagcaaggagccgggaacgatggagtggattacagccaagtgctgattacagatgaggaagaaatcaaggctaccaaccccgtggccacagaagaatatggagcagtggccatcaacaaccaggccgccaatacgcaggcgcagaccggactcgtgcacaaccagggggtgattcccggcatggtgtggcagaatagagacgtgtacctgcagggtcccatctgggccaaaattcctcacacggacggcaactttcacccgtctcccctgatgggcggctttggactgaagcacccgcctcctcaaattctcatcaagaacacaccggttccagcggacccgccgcttaccttcaaccaggccaagctgaactctttcatcacgcagtacagcaccggacaggtcagcgtggaaatcgagtgggagctgcagaaagaaaacagcaaacgctggaatccagagattcaatacacttccaactactacaaatctacaaatgtggactttgctgtcaacacggagggggtttatagcgagcctcgccccattggcacccgttacctcacccgcaacctgtaa

SEQ ID NO: 3338 - DNA, 2592 bp, Artificial Sequence
  Synthetic polynucleotide
ctggctgccgatggttatcttccagattggctcgaggacaacctctctgagggcattcgcgagtggtgggacttgaaacctggagccccgaagcccaaagccaaccagcaaaagcaggacgacggccggggtctggtgcttcctggctacaagtacctcggacccttcaacggactcgacaagggggagcccgtcaacgcggcggacgcagcggccctcgagcacgacaaggcctacgaccagcagctcaaagcgggtgacaatccgtacctgcggtataaccacgccgacgccgagtttcaggagcgtctgcaagaagatacgtcttttgggggcaacctcgggcgagcagtcttccaggccaagaagcgggttctcgaacctctcggtctggttgaggaaggcgctaagatggaagtgcagctccaagccagtggtggcggactggtgcaggcaggaggcagcttgaggctcagctgtgccgccagcggcttcaagatcacccactacaccatgggctggttccggcaggcccctggcaaggagagggagttcgtgagcaggattacctggggtggtgacaacaccttctacagcaacagcgtgaagggcaggttcaccatcagcagggacaacgccaagaacaccgtgtacctgcagatgaacagcctgaagcccgaggacaccgccgactactactgtgcagccggcagtaccagcaccgctacccccctgagggtggactactggggcaaaggcactcaggtgacagtgtcttcaggagggggtggcagcgctcctggaaagaaacgtccggtagagcagtcgccacaagagccagactcctcctcgggcatcggcaagacaggccagcagcccgctaaaaagagactcaattttggtcagactggcgactcagagtcagtccccgatccacaacctctcggagaacctccagcagccccctcaggtctgggacctaatacaatggcttcaggcggtggcgctccaatggcagacaataacgaaggcgccgacggagtgggtaattcctcgggaaattggcattgcgattccacatggctgggggacagagtcatcaccaccagcacccgaacctgggccctgcccacctacaacaaccacctctacaagcaaatctccaacggcacctcgggaggaagcaccaacgacaacacctattttggctacagcaccccctgggggtattttgacttcaacagattccactgtcacttttcaccacgtgactggcaacgactcatcaacaacaattggggattccggcccaaaagactcaacttcaagctgttcaacatccaggtcaaggaagtcacgacgaacgaaggcaccaagaccatcgccaataatctcaccagcaccgtgcaggtctttacggactcggagtaccagttaccgtacgtgctaggatccgctcaccagggatgtctgcctccgttcccggcggacgtcttcatggttcctcagtacggctatttaactttaaacaatggaagccaagccctgggacgttcctccttctactgtctggagtatttcccatcgcagatgctgagaaccggcaacaactttcagttcagctacaccttcgaggacgtgcctttccacagcagctacgcgcacagccagagcctggacaggctgatgaatcccctcatcgaccagtacctgtactacctggtcagaacgcaaacgactggaactggagggacgcagactctggcattcagccaagcgggtcctagctcaatggccaaccaggctagaaattgggtgcccggaccttgctaccggcagcagcgcgtctccacgacaaccaaccagaacaacaacagcaactttgcctggacgggagctgccaagtttaagctgaacggccgagactctctaatgaatccgggcgtggcaatggcttcccacaaggatgacgacgaccgcttcttcccttcgagcggggtcctgatttttggcaagcaaggagccgggaacgatggagtggattacagccaagtgctgattacagatgaggaagaaatcaaggctaccaaccccgtggccacagaagaatatggagcagtggccatcaacaaccaggccgccaatacgcaggcgcagaccggactcgtgcacaaccagggggtgattcccggcatggtgtggcagaatagagacgtgtacctgcagggtcccatctgggccaaaattcctcacacggacggcaactttcacccgtctcccctgatgggcggctttggactgaagcacccgcctcctcaaattctcatcaagaacacaccggttccagcggacccgccgcttaccttcaaccaggccaagctgaactctttcatcacgcagtacagcaccggacaggtcagcgtggaaatcgagtgggagctgcagaaagaaaacagcaaacgctggaatccagagattcaatacacttccaactactacaaatctacaaatgtggactttgctgtcaacacggagggggtttatagcgagcctcgccccattggcacccgttacctcacccgcaacctgtaa

SEQ ID NO: 3339 - DNA, 2601 bp, Artificial Sequence
  Synthetic polynucleotide
ctggctgccgatggttatcttccagattggctcgaggacaacctctctgagggcattcgcgagtggtgggacttgaaacctggagccccgaagcccaaagccaaccagcaaaagcaggacgacggccggggtctggtgcttcctggctacaagtacctcggacccttcaacggactcgacaagggggagcccgtcaacgcggcggacgcagcggccctcgagcacgacaaggcctacgaccagcagctcaaagcgggtgacaatccgtacctgcggtataaccacgccgacgccgagtttcaggagcgtctgcaagaagatacgtcttttgggggcaacctcgggcgagcagtcttccaggccaagaagcgggttctcgaacctctcggtctggttgaggaaggcgctaagatggaggtgcagctgcaggcttctggaggaggactggtgcaggctggagggagtctgaggctgtcttgcagtgcctcagtgaggactttctccatctacgccatgggctggtttaggcaggctcccgggaaggagcgcgaattcgtggccggaatcaaccggtctggcgacgtgaccaagtacgctgatttcgtgaaaggccggtttagcatttccagagacaacgccaagaatatggtgtatctgcagatgaactccctgaaacctgaagacacagctctgtactattgtgccgctacttgggcctacgataccgtgggggctctgacatcaggatataatttttggggccaggggacccaggtgacagtgagctccggaggaggaggaagcgctcctggaaagaaacgtccggtagagcagtcgccacaagagccagactcctcctcgggcatcggcaagacaggccagcagcccgctaaaaagagactcaattttggtcagactggcgactcagagtcagtccccgatccacaacctctcggagaacctccagcagccccctcaggtctgggacctaatacaatggcttcaggcggtggcgctccaatggcagacaataacgaaggcgccgacggagtgggtaattcctcgggaaattggcattgcgattccacatggctgggggacagagtcatcaccaccagcacccgaacctgggccctgcccacctacaacaaccacctctacaagcaaatctccaacggcacctcgggaggaagcaccaacgacaacacctattttggctacagcaccccctgggggtattttgacttcaacagattccactgtcacttttcaccacgtgactggcaacgactcatcaacaacaattggggattccggcccaaaagactcaacttcaagctgttcaacatccaggtcaaggaagtcacgacgaacgaaggcaccaagaccatcgccaataatctcaccagcaccgtgcaggtctttacggactcggagtaccagttaccgtacgtgctaggatccgctcaccagggatgtctgcctccgttcccggcggacgtcttcatggttcctcagtacggctatttaactttaaacaatggaagccaagccctgggacgttcctccttctactgtctggagtatttcccatcgcagatgctgagaaccggcaacaactttcagttcagctacaccttcgaggacgtgcctttccacagcagctacgcgcacagccagagcctggacaggctgatgaatcccctcatcgaccagtacctgtactacctggtcagaacgcaaacgactggaactggagggacgcagactctggcattcagccaagcgggtcctagctcaatggccaaccaggctagaaattgggtgcccggaccttgctaccggcagcagcgcgtctccacgacaaccaaccagaacaacaacagcaactttgcctggacgggagctgccaagtttaagctgaacggccgagactctctaatgaatccgggcgtggcaatggcttcccacaaggatgacgacgaccgcttcttcccttcgagcggggtcctgatttttggcaagcaaggagccgggaacgatggagtggattacagccaagtgctgattacagatgaggaagaaatcaaggctaccaaccccgtggccacagaagaatatggagcagtggccatcaacaaccaggccgccaatacgcaggcgcagaccggactcgtgcacaaccagggggtgattcccggcatggtgtggcagaatagagacgtgtacctgcagggtcccatctgggccaaaattcctcacacggacggcaactttcacccgtctcccctgatgggcggctttggactgaagcacccgcctcctcaaattctcatcaagaacacaccggttccagcggacccgccgcttaccttcaaccaggccaagctgaactctttcatcacgcagtacagcaccggacaggtcagcgtggaaatcgagtgggagctgcagaaagaaaacagcaaacgctggaatccagagattcaatacacttccaactactacaaatctacaaatgtggactttgctgtcaacacggagggggtttatagcgagcctcgccccattggcacccgttacctcacccgcaacctgtaa

SEQ ID NO: 3340 - DNA, 2367 bp, Artificial Sequence
  Synthetic polynucleotide
ctggctgccgatggttatcttccagattggctcgaggacaacctctctgagggcattcgcgagtggtgggacttgaaacctggagccccgaagcccaaagccaaccagcaaaagcaggacgacggccggggtctggtgcttcctggctacaagtacctcggacccttcaacggactcgacaagggggagcccgtcaacgcggcggacgcagcggccctcgagcacgacaaggcctacgaccagcagctcaaagcgggtgacaatccgtacctgcggtataaccacgccgacgccgagtttcaggagcgtctgcaagaagatacgtcttttgggggcaacctcgggcgagcagtcttccaggccaagaagcgggttctcgaacctctcggtctggttgaggaaggcgctaagatgccaagcagtgtaatcgatgcgctgcagtacaagctggagggcaccacgaggctgaccaggaagaggggtctgaagctggccacggccctcagccttagcaataagttcgtagagggcagccccagcggcggcggcggcagcggcggcggcggcagcgctcctggaaagaaacgtccggtagagcagtcgccacaagagccagactcctcctcgggcatcggcaagacaggccagcagcccgctaaaaagagactcaattttggtcagactggcgactcagagtcagtccccgatccacaacctctcggagaacctccagcagccccctcaggtctgggacctaatacaatggcttcaggcggtggcgctccaatggcagacaataacgaaggcgccgacggagtgggtaattcctcgggaaattggcattgcgattccacatggctgggggacagagtcatcaccaccagcacccgaacctgggccctgcccacctacaacaaccacctctacaagcaaatctccaacggcacctcgggaggaagcaccaacgacaacacctattttggctacagcaccccctgggggtattttgacttcaacagattccactgtcacttttcaccacgtgactggcaacgactcatcaacaacaattggggattccggcccaaaagactcaacttcaagctgttcaacatccaggtcaaggaagtcacgacgaacgaaggcaccaagaccatcgccaataatctcaccagcaccgtgcaggtctttacggactcggagtaccagttaccgtacgtgctaggatccgctcaccagggatgtctgcctccgttcccggcggacgtcttcatggttcctcagtacggctatttaactttaaacaatggaagccaagccctgggacgttcctccttctactgtctggagtatttcccatcgcagatgctgagaaccggcaacaactttcagttcagctacaccttcgaggacgtgcctttccacagcagctacgcgcacagccagagcctggacaggctgatgaatcccctcatcgaccagtacctgtactacctggtcagaacgcaaacgactggaactggagggacgcagactctggcattcagccaagcgggtcctagctcaatggccaaccaggctagaaattgggtgcccggaccttgctaccggcagcagcgcgtctccacgacaaccaaccagaacaacaacagcaactttgcctggacgggagctgccaagtttaagctgaacggccgagactctctaatgaatccgggcgtggcaatggcttcccacaaggatgacgacgaccgcttcttcccttcgagcggggtcctgatttttggcaagcaaggagccgggaacgatggagtggattacagccaagtgctgattacagatgaggaagaaatcaaggctaccaaccccgtggccacagaagaatatggagcagtggccatcaacaaccaggccgccaatacgcaggcgcagaccggactcgtgcacaaccagggggtgattcccggcatggtgtggcagaatagagacgtgtacctgcagggtcccatctgggccaaaattcctcacacggacggcaactttcacccgtctcccctgatgggcggctttggactgaagcacccgcctcctcaaattctcatcaagaacacaccggttccagcggacccgccgcttaccttcaaccaggccaagctgaactctttcatcacgcagtacagcaccggacaggtcagcgtggaaatcgagtgggagctgcagaaagaaaacagcaaacgctggaatccagagattcaatacacttccaactactacaaatctacaaatgtggactttgctgtcaacacggagggggtttatagcgagcctcgccccattggcacccgttacctcacccgcaacctgtaa

SEQ ID NO: 3341 - DNA, 2328 bp, Artificial Sequence
  Synthetic polynucleotide
ctggctgccgatggttatcttccagattggctcgaggacaacctctctgagggcattcgcgagtggtgggacttgaaacctggagccccgaagcccaaagccaaccagcaaaagcaggacgacggccggggtctggtgcttcctggctacaagtacctcggacccttcaacggactcgacaagggggagcccgtcaacgcggcggacgcagcggccctcgagcacgacaaggcctacgaccagcagctcaaagcgggtgacaatccgtacctgcggtataaccacgccgacgccgagtttcaggagcgtctgcaagaagatacgtcttttgggggcaacctcgggcgagcagtcttccaggccaagaagcgggttctcgaacctctcggtctggttgaggaaggcgctaagatgtataccatctggatgcccgagaaccccaggcccggtaccccctgcgacatcttcaccaacagcaggggcaagcgagccagcaacggcggcggcggcggcagcggcggcggcggcagcgctcctggaaagaaacgtccggtagagcagtcgccacaagagccagactcctcctcgggcatcggcaagacaggccagcagcccgctaaaaagagactcaattttggtcagactggcgactcagagtcagtccccgatccacaacctctcggagaacctccagcagccccctcaggtctgggacctaatacaatggcttcaggcggtggcgctccaatggcagacaataacgaaggcgccgacggagtgggtaattcctcgggaaattggcattgcgattccacatggctgggggacagagtcatcaccaccagcacccgaacctgggccctgcccacctacaacaaccacctctacaagcaaatctccaacggcacctcgggaggaagcaccaacgacaacacctattttggctacagcaccccctgggggtattttgacttcaacagattccactgtcacttttcaccacgtgactggcaacgactcatcaacaacaattggggattccggcccaaaagactcaacttcaagctgttcaacatccaggtcaaggaagtcacgacgaacgaaggcaccaagaccatcgccaataatctcaccagcaccgtgcaggtctttacggactcggagtaccagttaccgtacgtgctaggatccgctcaccagggatgtctgcctccgttcccggcggacgtcttcatggttcctcagtacggctatttaactttaaacaatggaagccaagccctgggacgttcctccttctactgtctggagtatttcccatcgcagatgctgagaaccggcaacaactttcagttcagctacaccttcgaggacgtgcctttccacagcagctacgcgcacagccagagcctggacaggctgatgaatcccctcatcgaccagtacctgtactacctggtcagaacgcaaacgactggaactggagggacgcagactctggcattcagccaagcgggtcctagctcaatggccaaccaggctagaaattgggtgcccggaccttgctaccggcagcagcgcgtctccacgacaaccaaccagaacaacaacagcaactttgcctggacgggagctgccaagtttaagctgaacggccgagactctctaatgaatccgggcgtggcaatggcttcccacaaggatgacgacgaccgcttcttcccttcgagcggggtcctgatttttggcaagcaaggagccgggaacgatggagtggattacagccaagtgctgattacagatgaggaagaaatcaaggctaccaaccccgtggccacagaagaatatggagcagtggccatcaacaaccaggccgccaatacgcaggcgcagaccggactcgtgcacaaccagggggtgattcccggcatggtgtggcagaatagagacgtgtacctgcagggtcccatctgggccaaaattcctcacacggacggcaactttcacccgtctcccctgatgggcggctttggactgaagcacccgcctcctcaaattctcatcaagaacacaccggttccagcggacccgccgcttaccttcaaccaggccaagctgaactctttcatcacgcagtacagcaccggacaggtcagcgtggaaatcgagtgggagctgcagaaagaaaacagcaaacgctggaatccagagattcaatacacttccaactactacaaatctacaaatgtggactttgctgtcaacacggagggggtttatagcgagcctcgccccattggcacccgttacctcacccgcaacctgtaa

SEQ ID NO: 3342 - DNA, 2298 bp, Artificial Sequence
  Synthetic polynucleotide
ctggctgccgatggttatcttccagattggctcgaggacaacctctctgagggcattcgcgagtggtgggacttgaaacctggagccccgaagcccaaagccaaccagcaaaagcaggacgacggccggggtctggtgcttcctggctacaagtacctcggacccttcaacggactcgacaagggggagcccgtcaacgcggcggacgcagcggccctcgagcacgacaaggcctacgaccagcagctcaaagcgggtgacaatccgtacctgcggtataaccacgccgacgccgagtttcaggagcgtctgcaagaagatacgtcttttgggggcaacctcgggcgagcagtcttccaggccaagaagcgggttctcgaacctctcggtctggttgaggaaggcgctaagatgaccttcttctacggcggcagcaggggcaagaggaacaacttcaagaccgaggagtacggcggcggcggcagcggcggcggcggcagcgctcctggaaagaaacgtccggtagagcagtcgccacaagagccagactcctcctcgggcatcggcaagacaggccagcagcccgctaaaaagagactcaattttggtcagactggcgactcagagtcagtccccgatccacaacctctcggagaacctccagcagccccctcaggtctgggacctaatacaatggcttcaggcggtggcgctccaatggcagacaataacgaaggcgccgacggagtgggtaattcctcgggaaattggcattgcgattccacatggctgggggacagagtcatcaccaccagcacccgaacctgggccctgcccacctacaacaaccacctctacaagcaaatctccaacggcacctcgggaggaagcaccaacgacaacacctattttggctacagcaccccctgggggtattttgacttcaacagattccactgtcacttttcaccacgtgactggcaacgactcatcaacaacaattggggattccggcccaaaagactcaacttcaagctgttcaacatccaggtcaaggaagtcacgacgaacgaaggcaccaagaccatcgccaataatctcaccagcaccgtgcaggtctttacggactcggagtaccagttaccgtacgtgctaggatccgctcaccagggatgtctgcctccgttcccggcggacgtcttcatggttcctcagtacggctatttaactttaaacaatggaagccaagccctgggacgttcctccttctactgtctggagtatttcccatcgcagatgctgagaaccggcaacaactttcagttcagctacaccttcgaggacgtgcctttccacagcagctacgcgcacagccagagcctggacaggctgatgaatcccctcatcgaccagtacctgtactacctggtcagaacgcaaacgactggaactggagggacgcagactctggcattcagccaagcgggtcctagctcaatggccaaccaggctagaaattgggtgcccggaccttgctaccggcagcagcgcgtctccacgacaaccaaccagaacaacaacagcaactttgcctggacgggagctgccaagtttaagctgaacggccgagactctctaatgaatccgggcgtggcaatggcttcccacaaggatgacgacgaccgcttcttcccttcgagcggggtcctgatttttggcaagcaaggagccgggaacgatggagtggattacagccaagtgctgattacagatgaggaagaaatcaaggctaccaaccccgtggccacagaagaatatggagcagtggccatcaacaaccaggccgccaatacgcaggcgcagaccggactcgtgcacaaccagggggtgattcccggcatggtgtggcagaatagagacgtgtacctgcagggtcccatctgggccaaaattcctcacacggacggcaactttcacccgtctcccctgatgggcggctttggactgaagcacccgcctcctcaaattctcatcaagaacacaccggttccagcggacccgccgcttaccttcaaccaggccaagctgaactctttcatcacgcagtacagcaccggacaggtcagcgtggaaatcgagtgggagctgcagaaagaaaacagcaaacgctggaatccagagattcaatacacttccaactactacaaatctacaaatgtggactttgctgtcaacacggagggggtttatagcgagcctcgccccattggcacccgttacctcacccgcaacctgtaa

SEQ ID NO: 3343 - DNA, 2211 bp, Artificial Sequence
  Synthetic polynucleotide
atggctgccgatggttatcttccagattggctcgaggacaaccttagtgaaggaattcgcgagtggtgggctttgaaacctggagcccctcaacccaaggcaaatcaacaacatcaagacaacgctcgaggtcttgtgcttccgggttacaaataccttggacccggcaacggactcgacaagggggagccggtcaacgcagcagacgcggcggccctcgagcacgacaaggcctacgaccagcagctcaaggccggagacaacccgtacctcaagtacaaccacgccgacgccgagttccaggagcggctcaaagaagatacgtcttttgggggcaacctcgggcgagcagtcttccaggccaaaaagaggcttcttgaacctcttggtctggttgaggaagcggctaaggcggctcctggaaagaagaggcctgtagagcagtctcctcaggaaccggactcctccgcgggtattggcaaatcgggtgcacagcccgctaaaaagagactcaatttcggtcagactggcgacacagagtcagtcccagaccctcaaccaatcggagaacctcccgcagccccctcaggtgtgggatctcttacaatggcttcaggtggtggcgcaccagtggcagacaataacgaaggtgccgatggagtgggtagttcctcgggaaattggcattgcgattcccaatggctgggggacagagtcatcaccaccagcacccgaacctgggccctgcccacctacaacaatcacctctacaagcaaatctccaacagcacatctggaggatcttcaaatgacaacgcctacttcggctacagcaccccctgggggtattttgacttcaacagattccactgccacttctcaccacgtgactggcagcgactcatcaacaacaactggggattccggcctaagcgactcaacttcaagctcttcaacattcaggtcaaagaggttacggacaacaatggagtcaagaccatcgccaataaccttaccagcacggtccaggtcttcacggactcagactatcagctcccgtacgtgctcgggtcggctcacgagggctgcctcccgccgttcccagcggacgttttcatgattcctcagtacgggtatctgacgcttaatgatggaagccaggccgtgggtcgttcgtccttttactgcctggaatatttcccgtcgcaaatgctaagaacgggtaacaacttccagttcaactacgagtttgagaacgtacctttccatagcagctacgctcacagccaaagcctggaccgactaatgaatccactcatcgaccaatacttgtactatctctcaaagactattaacgattctggacagaatcaacaaacgctaaaattcagtgtggccggacccagcaacatggctgtccagggaagaaactacatacctggacccagctaccgacaacaacgtgtctcaaccactgtgactcaaaacaacaacagcgaatttgcttggcctggagcttcttcttgggctctcaatggacgtaatagcttgatgaatcctggacctgctatggccagccacaaagaaggagaggaccgtttctttcctttgtctggatctttaatttttggcaaacaaggaactggaagagacaacgtggatgcggacgaagtcatgataaccaacgaagaagaaattaaaactactaacccggtagcaacggagtcctatggacaagtggccataaaccaccagagtgcccaagcacaggcgcagaccggctgggttcaaaaccaaggaatacttccgggtatggtttggcaggacagagatgtgtacctgcaaggacccatttgggccaaaattcctcacacggacggcaactttcacccttctccgctgatgggagggtttggaatgaagcacccgcctcctcagatcctcatcaaaaacacacctgtacctgcggatcctccaacggccttcaacaaggacaagctgaactctttcatcacccagtattctactggccaagtcagcgtggagatcgagtgggagctgcagaaggaaaacagcaagcgctggaacccggagatccagtacacttccaactattacaagtctaataatgttgaatttgctgttaatactgaaggtgtatatagtgaaccccgccccattggcaccagatacctgactcgtaatctgtaa

SEQ ID NO: 3344 - DNA, 2277 bp, Artificial Sequence
  Synthetic polynucleotide
ctggctgccgatggttatcttccagattggctcgaggacaaccttagtgaaggaattcgcgagtggtgggctttgaaacctggagcccctcaacccaaggcaaatcaacaacatcaagacaacgctcgaggtcttgtgcttccgggttacaaataccttggacccggcaacggactcgacaagggggagccggtcaacgcagcagacgcggcggccctcgagcacgacaaggcctacgaccagcagctcaaggccggagacaacccgtacctcaagtacaaccacgccgacgccgagttccaggagcggctcaaagaagatacgtcttttgggggcaacctcgggcgagcagtcttccaggccaaaaagaggcttcttgaacctcttggtctggttgaggaagcggctaagatgaacaaccagaagatcgtgaacctgaaggagaaggtggcccagctggaggccggcggcggcggcagcgctcctggaaagaagaggcctgtagagcagtctcctcaggaaccggactcctccgcgggtattggcaaatcgggtgcacagcccgctaaaaagagactcaatttcggtcagactggcgacacagagtcagtcccagaccctcaaccaatcggagaacctcccgcagccccctcaggtgtgggatctcttacaatggcttcaggtggtggcgcaccagtggcagacaataacgaaggtgccgatggagtgggtagttcctcgggaaattggcattgcgattcccaatggctgggggacagagtcatcaccaccagcacccgaacctgggccctgcccacctacaacaatcacctctacaagcaaatctccaacagcacatctggaggatcttcaaatgacaacgcctacttcggctacagcaccccctgggggtattttgacttcaacagattccactgccacttctcaccacgtgactggcagcgactcatcaacaacaactggggattccggcctaagcgactcaacttcaagctcttcaacattcaggtcaaagaggttacggacaacaatggagtcaagaccatcgccaataaccttaccagcacggtccaggtcttcacggactcagactatcagctcccgtacgtgctcgggtcggctcacgagggctgcctcccgccgttcccagcggacgttttcatgattcctcagtacgggtatctgacgcttaatgatggaagccaggccgtgggtcgttcgtccttttactgcctggaatatttcccgtcgcaaatgctaagaacgggtaacaacttccagttcaactacgagtttgagaacgtacctttccatagcagctacgctcacagccaaagcctggaccgactaatgaatccactcatcgaccaatacttgtactatctctcaaagactattaacgattctggacagaatcaacaaacgctaaaattcagtgtggccggacccagcaacatggctgtccagggaagaaactacatacctggacccagctaccgacaacaacgtgtctcaaccactgtgactcaaaacaacaacagcgaatttgcttggcctggagcttcttcttgggctctcaatggacgtaatagcttgatgaatcctggacctgctatggccagccacaaagaaggagaggaccgtttctttcctttgtctggatctttaatttttggcaaacaaggaactggaagagacaacgtggatgcggacgaagtcatgataaccaacgaagaagaaattaaaactactaacccggtagcaacggagtcctatggacaagtggccataaaccaccagagtgcccaagcacaggcgcagaccggctgggttcaaaaccaaggaatacttccgggtatggtttggcaggacagagatgtgtacctgcaaggacccatttgggccaaaattcctcacacggacggcaactttcacccttctccgctgatgggagggtttggaatgaagcacccgcctcctcagatcctcatcaaaaacacacctgtacctgcggatcctccaacggccttcaacaaggacaagctgaactctttcatcacccagtattctactggccaagtcagcgtggagatcgagtgggagctgcagaaggaaaacagcaagcgctggaacccggagatccagtacacttccaactattacaagtctaataatgttgaatttgctgttaatactgaaggtgtatatagtgaaccccgccccattggcaccagatacctgactcgtaatctgtaa

SEQ ID NO: 3345 - DNA, 2313 bp, Artificial Sequence
  Synthetic polynucleotide
ctggctgccgatggttatcttccagattggctcgaggacaaccttagtgaaggaattcgcgagtggtgggctttgaaacctggagcccctcaacccaaggcaaatcaacaacatcaagacaacgctcgaggtcttgtgcttccgggttacaaataccttggacccggcaacggactcgacaagggggagccggtcaacgcagcagacgcggcggccctcgagcacgacaaggcctacgaccagcagctcaaggccggagacaacccgtacctcaagtacaaccacgccgacgccgagttccaggagcggctcaaagaagatacgtcttttgggggcaacctcgggcgagcagtcttccaggccaaaaagaggcttcttgaacctcttggtctggttgaggaagcggctaagatgtataccatctggatgcccgagaaccccaggcccggtaccccctgcgacatcttcaccaacagcaggggcaagcgagccagcaacggcggcggcggcggcagcgctcctggaaagaagaggcctgtagagcagtctcctcaggaaccggactcctccgcgggtattggcaaatcgggtgcacagcccgctaaaaagagactcaatttcggtcagactggcgacacagagtcagtcccagaccctcaaccaatcggagaacctcccgcagccccctcaggtgtgggatctcttacaatggcttcaggtggtggcgcaccagtggcagacaataacgaaggtgccgatggagtgggtagttcctcgggaaattggcattgcgattcccaatggctgggggacagagtcatcaccaccagcacccgaacctgggccctgcccacctacaacaatcacctctacaagcaaatctccaacagcacatctggaggatcttcaaatgacaacgcctacttcggctacagcaccccctgggggtattttgacttcaacagattccactgccacttctcaccacgtgactggcagcgactcatcaacaacaactggggattccggcctaagcgactcaacttcaagctcttcaacattcaggtcaaagaggttacggacaacaatggagtcaagaccatcgccaataaccttaccagcacggtccaggtcttcacggactcagactatcagctcccgtacgtgctcgggtcggctcacgagggctgcctcccgccgttcccagcggacgttttcatgattcctcagtacgggtatctgacgcttaatgatggaagccaggccgtgggtcgttcgtccttttactgcctggaatatttcccgtcgcaaatgctaagaacgggtaacaacttccagttcaactacgagtttgagaacgtacctttccatagcagctacgctcacagccaaagcctggaccgactaatgaatccactcatcgaccaatacttgtactatctctcaaagactattaacgattctggacagaatcaacaaacgctaaaattcagtgtggccggacccagcaacatggctgtccagggaagaaactacatacctggacccagctaccgacaacaacgtgtctcaaccactgtgactcaaaacaacaacagcgaatttgcttggcctggagcttcttcttgggctctcaatggacgtaatagcttgatgaatcctggacctgctatggccagccacaaagaaggagaggaccgtttctttcctttgtctggatctttaatttttggcaaacaaggaactggaagagacaacgtggatgcggacgaagtcatgataaccaacgaagaagaaattaaaactactaacccggtagcaacggagtcctatggacaagtggccataaaccaccagagtgcccaagcacaggcgcagaccggctgggttcaaaaccaaggaatacttccgggtatggtttggcaggacagagatgtgtacctgcaaggacccatttgggccaaaattcctcacacggacggcaactttcacccttctccgctgatgggagggtttggaatgaagcacccgcctcctcagatcctcatcaaaaacacacctgtacctgcggatcctccaacggccttcaacaaggacaagctgaactctttcatcacccagtattctactggccaagtcagcgtggagatcgagtgggagctgcagaaggaaaacagcaagcgctggaacccggagatccagtacacttccaactattacaagtctaataatgttgaatttgctgttaatactgaaggtgtatatagtgaaccccgccccattggcaccagatacctgactcgtaatctgtaa

SEQ ID NO: 3346 - DNA, 2283 bp, Artificial Sequence
  Synthetic polynucleotide
ctggctgccgatggttatcttccagattggctcgaggacaaccttagtgaaggaattcgcgagtggtgggctttgaaacctggagcccctcaacccaaggcaaatcaacaacatcaagacaacgctcgaggtcttgtgcttccgggttacaaataccttggacccggcaacggactcgacaagggggagccggtcaacgcagcagacgcggcggccctcgagcacgacaaggcctacgaccagcagctcaaggccggagacaacccgtacctcaagtacaaccacgccgacgccgagttccaggagcggctcaaagaagatacgtcttttgggggcaacctcgggcgagcagtcttccaggccaaaaagaggcttcttgaacctcttggtctggttgaggaagcggctaagatgaccttcttctacggcggcagcaggggcaagaggaacaacttcaagaccgaggagtacggcggcggcggcagcgctcctggaaagaagaggcctgtagagcagtctcctcaggaaccggactcctccgcgggtattggcaaatcgggtgcacagcccgctaaaaagagactcaatttcggtcagactggcgacacagagtcagtcccagaccctcaaccaatcggagaacctcccgcagccccctcaggtgtgggatctcttacaatggcttcaggtggtggcgcaccagtggcagacaataacgaaggtgccgatggagtgggtagttcctcgggaaattggcattgcgattcccaatggctgggggacagagtcatcaccaccagcacccgaacctgggccctgcccacctacaacaatcacctctacaagcaaatctccaacagcacatctggaggatcttcaaatgacaacgcctacttcggctacagcaccccctgggggtattttgacttcaacagattccactgccacttctcaccacgtgactggcagcgactcatcaacaacaactggggattccggcctaagcgactcaacttcaagctcttcaacattcaggtcaaagaggttacggacaacaatggagtcaagaccatcgccaataaccttaccagcacggtccaggtcttcacggactcagactatcagctcccgtacgtgctcgggtcggctcacgagggctgcctcccgccgttcccagcggacgttttcatgattcctcagtacgggtatctgacgcttaatgatggaagccaggccgtgggtcgttcgtccttttactgcctggaatatttcccgtcgcaaatgctaagaacgggtaacaacttccagttcaactacgagtttgagaacgtacctttccatagcagctacgctcacagccaaagcctggaccgactaatgaatccactcatcgaccaatacttgtactatctctcaaagactattaacgattctggacagaatcaacaaacgctaaaattcagtgtggccggacccagcaacatggctgtccagggaagaaactacatacctggacccagctaccgacaacaacgtgtctcaaccactgtgactcaaaacaacaacagcgaatttgcttggcctggagcttcttcttgggctctcaatggacgtaatagcttgatgaatcctggacctgctatggccagccacaaagaaggagaggaccgtttctttcctttgtctggatctttaatttttggcaaacaaggaactggaagagacaacgtggatgcggacgaagtcatgataaccaacgaagaagaaattaaaactactaacccggtagcaacggagtcctatggacaagtggccataaaccaccagagtgcccaagcacaggcgcagaccggctgggttcaaaaccaaggaatacttccgggtatggtttggcaggacagagatgtgtacctgcaaggacccatttgggccaaaattcctcacacggacggcaactttcacccttctccgctgatgggagggtttggaatgaagcacccgcctcctcagatcctcatcaaaaacacacctgtacctgcggatcctccaacggccttcaacaaggacaagctgaactctttcatcacccagtattctactggccaagtcagcgtggagatcgagtgggagctgcagaaggaaaacagcaagcgctggaacccggagatccagtacacttccaactattacaagtctaataatgttgaatttgctgttaatactgaaggtgtatatagtgaaccccgccccattggcaccagatacctgactcgtaatctgtaa

SEQ ID NO: 3347 - DNA, 2283 bp, Artificial Sequence
  Synthetic polynucleotide
ctggctgccgatggttatcttccagattggctcgaggacaaccttagtgaaggaattcgcgagtggtgggctttgaaacctggagcccctcaacccaaggcaaatcaacaacatcaagacaacgctcgaggtcttgtgcttccgggttacaaataccttggacccggcaacggactcgacaagggggagccggtcaacgcagcagacgcggcggccctcgagcacgacaaggcctacgaccagcagctcaaggccggagacaacccgtacctcaagtacaaccacgccgacgccgagttccaggagcggctcaaagaagatacgtcttttgggggcaacctcgggcgagcagtcttccaggccaaaaagaggcttcttgaacctcttggtctggttgaggaagcggctaagatggcagctgcggccgccgcggctgcagcggctgcagccgccgcagctgcggctgcagcgggcggcggcggcagcgctcctggaaagaagaggcctgtagagcagtctcctcaggaaccggactcctccgcgggtattggcaaatcgggtgcacagcccgctaaaaagagactcaatttcggtcagactggcgacacagagtcagtcccagaccctcaaccaatcggagaacctcccgcagccccctcaggtgtgggatctcttacaatggcttcaggtggtggcgcaccagtggcagacaataacgaaggtgccgatggagtgggtagttcctcgggaaattggcattgcgattcccaatggctgggggacagagtcatcaccaccagcacccgaacctgggccctgcccacctacaacaatcacctctacaagcaaatctccaacagcacatctggaggatcttcaaatgacaacgcctacttcggctacagcaccccctgggggtattttgacttcaacagattccactgccacttctcaccacgtgactggcagcgactcatcaacaacaactggggattccggcctaagcgactcaacttcaagctcttcaacattcaggtcaaagaggttacggacaacaatggagtcaagaccatcgccaataaccttaccagcacggtccaggtcttcacggactcagactatcagctcccgtacgtgctcgggtcggctcacgagggctgcctcccgccgttcccagcggacgttttcatgattcctcagtacgggtatctgacgcttaatgatggaagccaggccgtgggtcgttcgtccttttactgcctggaatatttcccgtcgcaaatgctaagaacgggtaacaacttccagttcaactacgagtttgagaacgtacctttccatagcagctacgctcacagccaaagcctggaccgactaatgaatccactcatcgaccaatacttgtactatctctcaaagactattaacgattctggacagaatcaacaaacgctaaaattcagtgtggccggacccagcaacatggctgtccagggaagaaactacatacctggacccagctaccgacaacaacgtgtctcaaccactgtgactcaaaacaacaacagcgaatttgcttggcctggagcttcttcttgggctctcaatggacgtaatagcttgatgaatcctggacctgctatggccagccacaaagaaggagaggaccgtttctttcctttgtctggatctttaatttttggcaaacaaggaactggaagagacaacgtggatgcggacgaagtcatgataaccaacgaagaagaaattaaaactactaacccggtagcaacggagtcctatggacaagtggccataaaccaccagagtgcccaagcacaggcgcagaccggctgggttcaaaaccaaggaatacttccgggtatggtttggcaggacagagatgtgtacctgcaaggacccatttgggccaaaattcctcacacggacggcaactttcacccttctccgctgatgggagggtttggaatgaagcacccgcctcctcagatcctcatcaaaaacacacctgtacctgcggatcctccaacggccttcaacaaggacaagctgaactctttcatcacccagtattctactggccaagtcagcgtggagatcgagtgggagctgcagaaggaaaacagcaagcgctggaacccggagatccagtacacttccaactattacaagtctaataatgttgaatttgctgttaatactgaaggtgtatatagtgaaccccgccccattggcaccagatacctgactcgtaatctgtaa

SEQ ID NO: 3348 - protein, 726 aa, Artificial Sequence
  Synthetic polypeptide
MEVQLQASGGGLVQAGGSLRLSCAASGFKITHYTMGWFRQAPGKEREFVSRITWGGDNTFYSNSVKGRFTISRDNAKNTVYLQMNSLKPEDTADYYCAAGSTSTATPLRVDYWGKGTQVTVSSGGGGSAPGKKRPVEQSPQEPDSSSGIGKTGQQPAKKRLNFGQTGDSESVPDPQPLGEPPAAPSGLGPNTMASGGGAPMADNNEGADGVGNSSGNWHCDSTWLGDRVITTSTRTWALPTYNNHLYKQISNGTSGGSTNDNTYFGYSTPWGYFDFNRFHCHFSPRDWQRLINNNWGFRPKRLNFKLFNIQVKEVTTNEGTKTIANNLTSTVQVFTDSEYQLPYVLGSAHQGCLPPFPADVFMVPQYGYLTLNNGSQALGRSSFYCLEYFPSQMLRTGNNFQFSYTFEDVPFHSSYAHSQSLDRLMNPLIDQYLYYLVRTQTTGTGGTQTLAFSQAGPSSMANQARNWVPGPCYRQQRVSTTTNQNNNSNFAWTGAAKFKLNGRDSLMNPGVAMASHKDDDDRFFPSSGVLIFGKQGAGNDGVDYSQVLITDEEEIKATNPVATEEYGAVAINNQAANTQAQTGLVHNQGVIPGMVWQNRDVYLQGPIWAKIPHTDGNFHPSPLMGGFGLKHPPPQILIKNTPVPADPPLTFNQAKLNSFITQYSTGQVSVEIEWELQKENSKRWNPEIQYTSNYYKSTNVDFAVNTEGVYSEPRPIGTRYLTRNL

SEQ ID NO: 3349 - protein, 729 aa, Artificial Sequence
  Synthetic polypeptide
MEVQLQASGGGLVQAGGSLRLSCSASVRTFSIYAMGWFRQAPGKEREFVAGINRSGDVTKYADFVKGRFSISRDNAKNMVYLQMNSLKPEDTALYYCAATWAYDTVGALTSGYNFWGQGTQVTVSSGGGGSAPGKKRPVEQSPQEPDSSSGIGKTGQQPAKKRLNFGQTGDSESVPDPQPLGEPPAAPSGLGPNTMASGGGAPMADNNEGADGVGNSSGNWHCDSTWLGDRVITTSTRTWALPTYNNHLYKQISNGTSGGSTNDNTYFGYSTPWGYFDFNRFHCHFSPRDWQRLINNNWGFRPKRLNFKLFNIQVKEVTTNEGTKTIANNLTSTVQVFTDSEYQLPYVLGSAHQGCLPPFPADVFMVPQYGYLTLNNGSQALGRSSFYCLEYFPSQMLRTGNNFQFSYTFEDVPFHSSYAHSQSLDRLMNPLIDQYLYYLVRTQTTGTGGTQTLAFSQAGPSSMANQARNWVPGPCYRQQRVSTTTNQNNNSNFAWTGAAKFKLNGRDSLMNPGVAMASHKDDDDRFFPSSGVLIFGKQGAGNDGVDYSQVLITDEEEIKATNPVATEEYGAVAINNQAANTQAQTGLVHNQGVIPGMVWQNRDVYLQGPIWAKIPHTDGNFHPSPLMGGFGLKHPPPQILIKNTPVPADPPLTFNQAKLNSFITQYSTGQVSVEIEWELQKENSKRWNPEIQYTSNYYKSTNVDFAVNTEGVYSEPRPIGTRYLTRNL

SEQ ID NO: 3350 - protein, 651 aa, Artificial Sequence
  Synthetic polypeptide
MPSSVIDALQYKLEGTTRLTRKRGLKLATALSLSNKFVEGSPSGGGGSGGGGSAPGKKRPVEQSPQEPDSSSGIGKTGQQPAKKRLNFGQTGDSESVPDPQPLGEPPAAPSGLGPNTMASGGGAPMADNNEGADGVGNSSGNWHCDSTWLGDRVITTSTRTWALPTYNNHLYKQISNGTSGGSTNDNTYFGYSTPWGYFDFNRFHCHFSPRDWQRLINNNWGFRPKRLNFKLFNIQVKEVTTNEGTKTIANNLTSTVQVFTDSEYQLPYVLGSAHQGCLPPFPADVFMVPQYGYLTLNNGSQALGRSSFYCLEYFPSQMLRTGNNFQFSYTFEDVPFHSSYAHSQSLDRLMNPLIDQYLYYLVRTQTTGTGGTQTLAFSQAGPSSMANQARNWVPGPCYRQQRVSTTTNQNNNSNFAWTGAAKFKLNGRDSLMNPGVAMASHKDDDDRFFPSSGVLIFGKQGAGNDGVDYSQVLITDEEEIKATNPVATEEYGAVAINNQAANTQAQTGLVHNQGVIPGMVWQNRDVYLQGPIWAKIPHTDGNFHPSPLMGGFGLKHPPPQILIKNTPVPADPPLTFNQAKLNSFITQYSTGQVSVEIEWELQKENSKRWNPEIQYTSNYYKSTNVDFAVNTEGVYSEPRPIGTRYLTRNL

SEQ ID NO: 3351 - protein, 638 aa, Artificial Sequence
  Synthetic polypeptide
MYTIWMPENPRPGTPCDIFTNSRGKRASNGGGGGSGGGGSAPGKKRPVEQSPQEPDSSSGIGKTGQQPAKKRLNFGQTGDSESVPDPQPLGEPPAAPSGLGPNTMASGGGAPMADNNEGADGVGNSSGNWHCDSTWLGDRVITTSTRTWALPTYNNHLYKQISNGTSGGSTNDNTYFGYSTPWGYFDFNRFHCHFSPRDWQRLINNNWGFRPKRLNFKLFNIQVKEVTTNEGTKTIANNLTSTVQVFTDSEYQLPYVLGSAHQGCLPPFPADVFMVPQYGYLTLNNGSQALGRSSFYCLEYFPSQMLRTGNNFQFSYTFEDVPFHSSYAHSQSLDRLMNPLIDQYLYYLVRTQTTGTGGTQTLAFSQAGPSSMANQARNWVPGPCYRQQRVSTTTNQNNNSNFAWTGAAKFKLNGRDSLMNPGVAMASHKDDDDRFFPSSGVLIFGKQGAGNDGVDYSQVLITDEEEIKATNPVATEEYGAVAINNQAANTQAQTGLVHNQGVIPGMVWQNRDVYLQGPIWAKIPHTDGNFHPSPLMGGFGLKHPPPQILIKNTPVPADPPLTFNQAKLNSFITQYSTGQVSVEIEWELQKENSKRWNPEIQYTSNYYKSTNVDFAVNTEGVYSEPRPIGTRYLTRNL

SEQ ID NO: 3352 - protein, 628 aa, Artificial Sequence
  Synthetic polypeptide
MTFFYGGSRGKRNNFKTEEYGGGGSGGGGSAPGKKRPVEQSPQEPDSSSGIGKTGQQPAKKRLNFGQTGDSESVPDPQPLGEPPAAPSGLGPNTMASGGGAPMADNNEGADGVGNSSGNWHCDSTWLGDRVITTSTRTWALPTYNNHLYKQISNGTSGGSTNDNTYFGYSTPWGYFDFNRFHCHFSPRDWQRLINNNWGFRPKRLNFKLFNIQVKEVTTNEGTKTIANNLTSTVQVFTDSEYQLPYVLGSAHQGCLPPFPADVFMVPQYGYLTLNNGSQALGRSSFYCLEYFPSQMLRTGNNFQFSYTFEDVPFHSSYAHSQSLDRLMNPLIDQYLYYLVRTQTTGTGGTQTLAFSQAGPSSMANQARNWVPGPCYRQQRVSTTTNQNNNSNFAWTGAAKFKLNGRDSLMNPGVAMASHKDDDDRFFPSSGVLIFGKQGAGNDGVDYSQVLITDEEEIKATNPVATEEYGAVAINNQAANTQAQTGLVHNQGVIPGMVWQNRDVYLQGPIWAKIPHTDGNFHPSPLMGGFGLKHPPPQILIKNTPVPADPPLTFNQAKLNSFITQYSTGQVSVEIEWELQKENSKRWNPEIQYTSNYYKSTNVDFAVNTEGVYSEPRPIGTRYLTRNL

SEQ ID NO: 3353 - protein, 621 aa, Artificial Sequence
  Synthetic polypeptide
MNNQKIVNLKEKVAQLEAGGGGSAPGKKRPVEQSPQEPDSSAGIGKSGAQPAKKRLNFGQTGDTESVPDPQPIGEPPAAPSGVGSLTMASGGGAPVADNNEGADGVGSSSGNWHCDSQWLGDRVITTSTRTWALPTYNNHLYKQISNSTSGGSSNDNAYFGYSTPWGYFDFNRFHCHFSPRDWQRLINNNWGFRPKRLNFKLFNIQVKEVTDNNGVKTIANNLTSTVQVFTDSDYQLPYVLGSAHEGCLPPFPADVFMIPQYGYLTLNDGSQAVGRSSFYCLEYFPSQMLRTGNNFQFNYEFENVPFHSSYAHSQSLDRLMNPLIDQYLYYLSKTINDSGQNQQTLKFSVAGPSNMAVQGRNYIPGPSYRQQRVSTTVTQNNNSEFAWPGASSWALNGRNSLMNPGPAMASHKEGEDRFFPLSGSLIFGKQGTGRDNVDADEVMITNEEEIKTTNPVATESYGQVAINHQSAQAQAQTGWVQNQGILPGMVWQDRDVYLQGPIWAKIPHTDGNFHPSPLMGGFGMKHPPPQILIKNTPVPADPPTAFNKDKLNSFITQYSTGQVSVEIEWELQKENSKRWNPEIQYTSNYYKSNNVEFAVNTEGVYSEPRPIGTRYLTRNL

SEQ ID NO: 3354 - protein, 633 aa, Artificial Sequence
  Synthetic polypeptide
MYTIWMPENPRPGTPCDIFTNSRGKRASNGGGGGSAPGKKRPVEQSPQEPDSSAGIGKSGAQPAKKRLNFGQTGDTESVPDPQPIGEPPAAPSGVGSLTMASGGGAPVADNNEGADGVGSSSGNWHCDSQWLGDRVITTSTRTWALPTYNNHLYKQISNSTSGGSSNDNAYFGYSTPWGYFDFNRFHCHFSPRDWQRLINNNWGFRPKRLNFKLFNIQVKEVTDNNGVKTIANNLTSTVQVFTDSDYQLPYVLGSAHEGCLPPFPADVFMIPQYGYLTLNDGSQAVGRSSFYCLEYFPSQMLRTGNNFQFNYEFENVPFHSSYAHSQSLDRLMNPLIDQYLYYLSKTINDSGQNQQTLKFSVAGPSNMAVQGRNYIPGPSYRQQRVSTTVTQNNNSEFAWPGASSWALNGRNSLMNPGPAMASHKEGEDRFFPLSGSLIFGKQGTGRDNVDADEVMITNEEEIKTTNPVATESYGQVAINHQSAQAQAQTGWVQNQGILPGMVWQDRDVYLQGPIWAKIPHTDGNFHPSPLMGGFGMKHPPPQILIKNTPVPADPPTAFNKDKLNSFITQYSTGQVSVEIEWELQKENSKRWNPEIQYTSNYYKSNNVEFAVNTEGVYSEPRPIGTRYLTRNL

SEQ ID NO: 3355 - protein, 623 aa, Artificial Sequence
  Synthetic polypeptide
MTFFYGGSRGKRNNFKTEEYGGGGSAPGKKRPVEQSPQEPDSSAGIGKSGAQPAKKRLNFGQTGDTESVPDPQPIGEPPAAPSGVGSLTMASGGGAPVADNNEGADGVGSSSGNWHCDSQWLGDRVITTSTRTWALPTYNNHLYKQISNSTSGGSSNDNAYFGYSTPWGYFDFNRFHCHFSPRDWQRLINNNWGFRPKRLNFKLFNIQVKEVTDNNGVKTIANNLTSTVQVFTDSDYQLPYVLGSAHEGCLPPFPADVFMIPQYGYLTLNDGSQAVGRSSFYCLEYFPSQMLRTGNNFQFNYEFENVPFHSSYAHSQSLDRLMNPLIDQYLYYLSKTINDSGQNQQTLKFSVAGPSNMAVQGRNYIPGPSYRQQRVSTTVTQNNNSEFAWPGASSWALNGRNSLMNPGPAMASHKEGEDRFFPLSGSLIFGKQGTGRDNVDADEVMITNEEEIKTTNPVATESYGQVAINHQSAQAQAQTGWVQNQGILPGMVWQDRDVYLQGPIWAKIPHTDGNFHPSPLMGGFGMKHPPPQILIKNTPVPADPPTAFNKDKLNSFITQYSTGQVSVEIEWELQKENSKRWNPEIQYTSNYYKSNNVEFAVNTEGVYSEPRPIGTRYLTRNL

SEQ ID NO: 3356 - protein, 623 aa, Artificial Sequence
  Synthetic polypeptide
MAAAAAAAAAAAAAAAAAAAGGGGSAPGKKRPVEQSPQEPDSSAGIGKSGAQPAKKRLNFGQTGDTESVPDPQPIGEPPAAPSGVGSLTMASGGGAPVADNNEGADGVGSSSGNWHCDSQWLGDRVITTSTRTWALPTYNNHLYKQISNSTSGGSSNDNAYFGYSTPWGYFDFNRFHCHFSPRDWQRLINNNWGFRPKRLNFKLFNIQVKEVTDNNGVKTIANNLTSTVQVFTDSDYQLPYVLGSAHEGCLPPFPADVFMIPQYGYLTLNDGSQAVGRSSFYCLEYFPSQMLRTGNNFQFNYEFENVPFHSSYAHSQSLDRLMNPLIDQYLYYLSKTINDSGQNQQTLKFSVAGPSNMAVQGRNYIPGPSYRQQRVSTTVTQNNNSEFAWPGASSWALNGRNSLMNPGPAMASHKEGEDRFFPLSGSLIFGKQGTGRDNVDADEVMITNEEEIKTTNPVATESYGQVAINHQSAQAQAQTGWVQNQGILPGMVWQDRDVYLQGPIWAKIPHTDGNFHPSPLMGGFGMKHPPPQILIKNTPVPADPPTAFNKDKLNSFITQYSTGQVSVEIEWELQKENSKRWNPEIQYTSNYYKSNNVEFAVNTEGVYSEPRPIGTRYLTRNL

SEQ ID NO: 3357 - DNA, 2214 bp, Artificial Sequence
  Synthetic polynucleotide
atggctgccgatggttatcttccagattggctcgaggacaacctctctgagggcattcgcgagtggtgggacttgaaacctggagccccgaagcccaaagccaaccagcaaaagcaggacgacggccggggtctggtgcttcctggctacaagtacctcggacccttcaacggactcgacaagggggagcccgtcaacgcggcggacgcagcggccctcgagcacgacaaggcctacgaccagcagctcaaagcgggtgacaatccgtacctgcggtataaccacgccgacgtcgagtttcaggagcgtctgcaagaagatacgtcttttgggggcaacctcgggcgagcagtcttccaggccaagaagagggttctcgaaccttttggtctggttgaggaaggcgctaagacggctcctggaaagaaacgtccggtagagcagtcgccacaagagccagactcctcctcgggcatcggcaagaaaggccaacagcccgccagaaaaagactcaattttggccagactggcgactcagagtcagttccagaccctcaacctctcggagaacctccagcagcgccctctggtgtgggacctaatacaatggctgcaggcggtggcgcaccaatggcagacaataacgagggcgccgacggagtgggtaattcctcgggaaattggcattgcgattccacatggatgggggacagagtcatcaccaccagcacccgaacctgggccctgcccacctacaacaaccacctctacaagcaaatctccaacggcacctcgggaggaagcaccaacgacaacacctattttggctacagcaccccctgggggtattttgatttcaacagattccactgccacttctcaccacgtgactggcagcgactcatcaacaacaactggggattccggccaaaaagactcagcttcaagctcttcaacatccaggtcaaggaggtcacgcagaatgaaggcaccaagaccatcgccaataaccttaccagcacgattcaggtatttacggactcggaataccagctgccatacgtcctcggctccgcgcaccagggctgcctgcctccgttcccggcggacgtcttcatgattccccagtacggctaccttacactgaacaatggaagtcaagccgtaggccgttcctccttctactgcctggaatattttccttctcaaatgctgagaacgggcaacaactttgagttcagctaccagtttgaggacgtgccttttcacagcagctacgcgcacagccaaagcctggaccggctgatgaaccccctcatcgaccagtacctgtactacctgtctcggactcagtccacgggaggtaccgcaagaactcagcagttgctattttctcaggccgggcctaatacaatggccaatcaggcaaagaactggctgccaggaccctgttaccgccaacaacgcgtctcaacgacaaccgggcaaaacaacaatagcaactctgcctggactgctgggaccaaataccatctgaatggaagaaattcattggctaatcctggcatcgctatggcaacacacaaagacgacgaggagcgtttttttcccagtaacgggatcctgatttttggcaaacaaaatgctgccagagacaatgcggattacagcgatgtcatgctcaccagcgaggaagaaatcaaaaccactaaccctgtggctacagaggaatacggtatcgtggcagataacttgcagcagcaaaacacggctcctcaaattggaactgtcaacagccagggggccttacccggtatggtctggcagaaccgggacgtgtacctgcagggtcccatctgggccaagattcctcacacggacggcaacttccacccatctccgctgatgggcggctttggcctgaaacatcctccgcctcagatcctgatcaagaacacgcctgtacctgcggatcctccgaccaccttcaaccagtcaaagctgaactctttcatcacgcaatacagcaccggacaggtcagcgtggaaattgaatgggagctacagaaggaaaacagcaagcgctggaaccccgagatccagtacacctccaactactacaaatctacaagtgtggactttgctgttaatacagaaggcgtgtactctgaaccccgccccattggcacccgttacctcacccgtaatctgtaa

SEQ ID NO: 3358 - DNA, 2214 bp, Artificial Sequence
  Synthetic polynucleotide
atggctgccgatggttatcttccagattggctcgaggacaacctctctgagggcattcgcgagtggtgggcgctgaaacctggagccccgaagcccaaagccaaccagcaaaagcaggacgacggccggggtctggtgcttcctggctacaagtacctcggacccttcaacggactcgacaagggggagcccgtcaacgcggcggacgcagcggccctcgagcacgacaaggcctacgaccagcagctcaaagcgggtgacaatccgtacctgcggtataaccacgccgacgccgagtttcaggagcgtctgcaagaagatacgtcttttgggggcaacctcgggcgagcagtcttccaggccaagaagcgggttctcgaacctctcggtctggttgaggacggcgctaagacggctcctggaaagaagagaccagtagagcagtcaccccaagaaccagactcctcctcgggcatcggcaagaaaggccaacagcccgccagaaaaagactcaattttggccagactggcgactcagagtcagttccagaccctcaacctctcggagaacctccagcaacccccgctgctgtgggacctactacaatggcttcaggcggtggcgcaccaatggcagacaataacgaaggcgccgacggagtgggtagttcctcgggaaattggcattgcgattccacatggctgggcgacagagtcatcaccaccagcacccgaacctgggccctgcccacctacaacaaccacctctacaagcaaatctccaacgggacatcgggaggagccaccaacgacaacacctacttcggctacagcaccccctgggggtattttgactttaacagattccactgccacttttcaccacgtgactggcagcgactcatcaacaacaactggggattccggcccaagagactcagcttcaagctcttcaacatccaggtcaaggaggtcacgcagaatgaaggcaccaagaccatcgccaataacctcaccagcaccatccaggtgtttacggactcggagtaccagctgccgtacgttctcggctctgcccaccagggctgcctgcctccgttcccggcggacgtgttcatgattccccagtacggctacctaacactcaacaacggtagtcaggccgtgggacgctcctccttctactgcctggaatactttccttcgcagatgctgagaaccggcaacaacttccagtttacttacaccttcgaggacgtgcctttccacagcagctacgcccacagccagagcttggaccggctgatgaatcctctgattgaccagtacctgtactacttgtctcggactcaaacaacaggaggcacggcaaatacgcagactctgggcttcagccaaggtgggcctaatacaatggccaatcaggcaaagaactggctgccaggaccctgttaccgccaacaacgcgtctcaacgacaaccgggcaaaacaacaatagcaactttgcctggactgctgggaccaaataccatctgaatggaagaaattcattggctaatcctggcatcgctatggcaacacacaaggacgacgaggagcgtttttttcccagtaacgggatcctgatttttggcaaacaaaatgctgccagagacaatgcggattacagcgatgtcatgctcaccagcgaggaagaaatcaaaaccactaaccctgtggctacagaggaatacggtatcgtggcagataacttgcagcagcaaaacacggctcctcaaattggaactgtcaacagccagggggccttacccggtatggtctggcagaaccgggacgtgtacctgcagggtcccatctgggccaagattcctcacacggacggcaacttccacccgtctccgctgatgggcggctttggcctgaaacatcctccgcctcagatcctgatcaagaacacgcctgtacctgcggatcctccgaccaccttcaaccagtcaaagctgaactctttcatcacgcaatacagcaccggacaggtcagcgtggaaatcgagtgggagctgcagaaagaaaacagcaagcgctggaaccccgagatccagtacacctccaactactacaaatctacaaatgtggactttgctgtcaacacggagggggtttatagcgagcctcgccccattggcacccgttacctcacccgcaacctgtaa

SEQ ID NO: 3359 - DNA, 2211 bp, Artificial Sequence
  Synthetic polynucleotide
  modified_base (715)..(715): a, c, g, or t
  misc_feature (715)..(715): n is a, c, g, or t
atggctgccgatggttatcttccagattggctcgaggacaacctctctgagggcattcgcgagtggtgggcgctgaaacctggagccccgaagcccaaagccaaccagcaaaagcaggacgacggccggggtctggtgcttcctggctacaagtacctcggacccttcaacggactcgacaagggggagcccgtcaacgcggcggacgcagcggccctcgagcacgacaaggcctacgaccagcagctcaaagcgggtgacaatccgtacctgcggtataaccacgccgacgccgagtttcaggagcgtctgcaagaagatacgtcttttgggggcaacctcgggcgagcagtcttccaggccaagaagcgggttctcgaacctctcggtctggttgaggaaggcgctaagacggctcctggaaagaaacgtccggtagagcagtcgccacaagagccagactcctcctcgggcatcggcaagacaggccagcagcccgctaaaaagaggctcaattttggtcagactggcgactcagagtcagtccccgacccacaacctctcggagaacctccagcaacccccgctgctgtgggacctactacaatggcttcaggcggtggcgcaccaatggcagacaataacgaaggcgccgacggagtgggtaatgcctcaggaaattggcattgcgattccacatggctgggcgacagantcatcaccaccagcacccgaacatgggccttgcccacctataacaaccacctctacaagcaaatctccagtgcttcaacgggggccagcaacgacaaccactacttcggctacagcaccccctgggggtattttgatttcaacagattccactgccatttctcaccacgtgactggcagcgactcatcaacaacaattggggattccggcccaagagactcaacttcaagctcttcaacatccaagtcaaggaggtcacgcagaatgaaggcaccaagaccatcgccaataacctcaccagcaccatccaggtgtttacggactcggagtaccagctgccgtacgttctcggctctgcccaccagggctgcctgcctccgttcccggcggacgtgttcatgattccccagtacggctacctaacactcaacaacggtagtcaggccgtgggacgctcctccttctactgcctggaatattttccatctcaaatgctgcgaactggaaacaattttgaattcagctacaccttcgaggacgtgcctttccacagcagctacgcacacagccagagcttggaccgactgatgaatcctctcatcgaccagtacctgtactacttgtctcggactcaaacaacaggaggcacggcaaatacgcagactctgggcttcagccaaggtgggcctaatacaatggccaatcaggcaaagaactggctgccaggaccctgttaccgccaacaacgcgtctcaacgacaaccgggcaaaacaacaatagcaactttgcctggactgctgggaccaaataccatctgaatggaagaaattcattggctaatcctggcatcgctatggcaacacacaaagacgacgaggagcgtttttttcccagtaacgggatcctgatttttggcaaacaaaatgctgccagagacaatgcggattacagcgatgtcatgctcaccagcgaggaagaaatcaaaaccactaaccctgtggctacagaggaatacggtatcgtggcagataacttgcagcagcaaaacacggctcctcaaattggaactgtcaacagccaggggaccttacccggtatggtctggcagaaccgggacgtgtacctgcagggtcccatctgggccaagattcctcacacggacggcaacttccacccgtctccgctgatgggcggctttggcctgaaacatcctccgcctcagatcctgatcaagaacacgcctgtacctgcggatcctccgaccaccttcaaccagtcaaagctgaactctttcatcacgcaatacagcaccggacaggtcagcgtggaaattgaatgggagctacagaaggaaaacagcaagcgctggaaccccgagatccagtacacctccaattactacaaatctacaagtgtggactttgctgttaatacagaaggcgtgtactctgaaccccgccccattggcacgcgtttcctcacccgtaatctgtaa

SEQ ID NO: 3360 - DNA, 2214 bp, Artificial Sequence
  Synthetic polynucleotide
atggctgccgatggttatcttccagattggctcgaggacaacctctctgagggcattcgcgagtggtgggcgctgaaacctggagccccgaagcccaaagccaaccagcaaaagcaggacgacggccggggtctggtgcttcctggctacaagtacctcggacccttcaacggactcgacaagggggagcccgtcaacgcggcggacgcagcggccctcgagcacgacaaggcctacgaccagcagctcaaagcgggtgacaatccgtacctgcggtataaccacgccgacgccgagtttcaggagcgtctgcaagaagatacgtcttttgggggcaacctcgggcgagcagtcttccaggccaagaagcgggttctcgaacctctcggtctggttgaggaaggcgctaagacggctcctggaaagaaacgtccggtagagcagtcgccacaagagccagactcctcctcgggcatcggcaagacaggccagcagcccgctaaaaagaggctcaattttggccagactggcgactcagagtcagttccagaccctcaacctctcggagaacctccagcagcgccctctggtgtgggacctaatacaatggctgcaggcggtggcgcaccaatggcagacaataacgaaggcgccgacggagtgggtagttcctcgggaaattggcattgcgattccacatggctgggcgacagagtcatcaccaccagcacccgaacctgggccctgcccacctacaacaaccacctctacaagcaaatctccaacgggacatcgggaggagccaccaacgacaacacctacttcggctacagcaccccctgggggtattttgactttaacagattccactgccacttttcaccacgtgactggcagcgactcatcaacaacaactggggattccggcccaagagactcagcttcaagctcttcaacatccaggtcaaggaggtcacgcagaatgaaggcaccaagaccatcgccaataacctcaccagcaccatccaggtgtttacggactcggagtaccagctgccgtacgtactaggatccgctcaccagggatgtctgcctccgttcccggcggacgtgttcatgattccccagtacggctacctaacactcaacaacggtagtcaggccgtgggacgctcctccttctactgcctggaatattttccatctcagatgctgagaacgggcaataactttaccttcagctacaccttcgaggacgtgcctttccacagcagctatgcccacagccagagcttggaccggctgatgaatcctctgattgaccagtacctgtactacttgtctcggactcaaacaacaggaggcacggcaaatacgcagactctgggcttcagccaaggtgggcctaatacaatggccaatcaggcaaagaactggctgccaggaccctgttaccgccaacaacgcgtctcaacgacaaccgggcaaaacaacaatagcaactttgcctggactgctgggaccaaataccatctgaatggaagaaattcattggctaatcctggcatcgctatggcaacacacaaagacgacgaggagcgtttttttcccagtaacgggatcctgatttttggcaaacaaaatgctgccagagacaatgcggattacagcgatgtcatgctcaccagcgaggaagaaatcaaaaccactaaccctgtggctacagaggaatacggtatcgtggcagataacttgcagcagcaaaacacggctcctcaaattggaactgtcaacagccagggggccttacccggtatggtctggcagaaccgggacgtgtacctgcagggtcccatctgggccaagattcctcacacggacggcaacttccacccgtctccgctaatgggaggatttggactgaagcacccacctcctcagatcctgatcaagaacacgccggtacctgcggatcctccgaccaccttcaaccagtcaaagctgtactctttcatcacgcaatacagcaccggacaggtcagcgtggaaattgaatgggagctgcagaaggaaaacagcaagcgctggaaccccgagatccaatacacctccaactactacaaatctacaagtgtggactttgctgttaatacagaaggcgtgtactctgaaccccgccccattggcacccgttacctcacccgtaatctgtaa

SEQ ID NO: 3361 - protein, 737 aa, Artificial Sequence
  Synthetic polypeptide
MAADGYLPDWLEDNLSEGIREWWDLKPGAPKPKANQQKQDDGRGLVLPGYKYLGPFNGLDKGEPVNAADAAALEHDKAYDQQLKAGDNPYLRYNHADVEFQERLQEDTSFGGNLGRAVFQAKKRVLEPFGLVEEGAKTAPGKKRPVEQSPQEPDSSSGIGKKGQQPARKRLNFGQTGDSESVPDPQPLGEPPAAPSGVGPNTMAAGGGAPMADNNEGADGVGNSSGNWHCDSTWMGDRVITTSTRTWALPTYNNHLYKQISNGTSGGSTNDNTYFGYSTPWGYFDFNRFHCHFSPRDWQRLINNNWGFRPKRLSFKLFNIQVKEVTQNEGTKTIANNLTSTIQVFTDSEYQLPYVLGSAHQGCLPPFPADVFMIPQYGYLTLNNGSQAVGRSSFYCLEYFPSQMLRTGNNFEFSYQFEDVPFHSSYAHSQSLDRLMNPLIDQYLYYLSRTQSTGGTARTQQLLFSQAGPNTMANQAKNWLPGPCYRQQRVSTTTGQNNNSNSAWTAGTKYHLNGRNSLANPGIAMATHKDDEERFFPSNGILIFGKQNAARDNADYSDVMLTSEEEIKTTNPVATEEYGIVADNLQQQNTAPQIGTVNSQGALPGMVWQNRDVYLQGPIWAKIPHTDGNFHPSPLMGGFGLKHPPPQILIKNTPVPADPPTTFNQSKLNSFITQYSTGQVSVEIEWELQKENSKRWNPEIQYTSNYYKSTSVDFAVNTEGVYSEPRPIGTRYLTRNL

SEQ ID NO: 3362 - protein, 737 aa, Artificial Sequence
  Synthetic polypeptide
MAADGYLPDWLEDNLSEGIREWWALKPGAPKPKANQQKQDDGRGLVLPGYKYLGPFNGLDKGEPVNAADAAALEHDKAYDQQLKAGDNPYLRYNHADAEFQERLQEDTSFGGNLGRAVFQAKKRVLEPLGLVEDGAKTAPGKKRPVEQSPQEPDSSSGIGKKGQQPARKRLNFGQTGDSESVPDPQPLGEPPATPAAVGPTTMASGGGAPMADNNEGADGVGSSSGNWHCDSTWLGDRVITTSTRTWALPTYNNHLYKQISNGTSGGATNDNTYFGYSTPWGYFDFNRFHCHFSPRDWQRLINNNWGFRPKRLSFKLFNIQVKEVTQNEGTKTIANNLTSTIQVFTDSEYQLPYVLGSAHQGCLPPFPADVFMIPQYGYLTLNNGSQAVGRSSFYCLEYFPSQMLRTGNNFQFTYTFEDVPFHSSYAHSQSLDRLMNPLIDQYLYYLSRTQTTGGTANTQTLGFSQGGPNTMANQAKNWLPGPCYRQQRVSTTTGQNNNSNFAWTAGTKYHLNGRNSLANPGIAMATHKDDEERFFPSNGILIFGKQNAARDNADYSDVMLTSEEEIKTTNPVATEEYGIVADNLQQQNTAPQIGTVNSQGALPGMVWQNRDVYLQGPIWAKIPHTDGNFHPSPLMGGFGLKHPPPQILIKNTPVPADPPTTFNQSKLNSFITQYSTGQVSVEIEWELQKENSKRWNPEIQYTSNYYKSTNVDFAVNTEGVYSEPRPIGTRYLTRNL

SEQ ID NO: 3363 - protein, 736 aa, Artificial Sequence
  Synthetic polypeptide
  MOD_RES (239)..(239): Any naturally occurring amino acid
MAADGYLPDWLEDNLSEGIREWWALKPGAPKPKANQQKQDDGRGLVLPGYKYLGPFNGLDKGEPVNAADAAALEHDKAYDQQLKAGDNPYLRYNHADAEFQERLQEDTSFGGNLGRAVFQAKKRVLEPLGLVEEGAKTAPGKKRPVEQSPQEPDSSSGIGKTGQQPAKKRLNFGQTGDSESVPDPQPLGEPPATPAAVGPTTMASGGGAPMADNNEGADGVGNASGNWHCDSTWLGDRXITTSTRTWALPTYNNHLYKQISSASTGASNDNHYFGYSTPWGYFDFNRFHCHFSPRDWQRLINNNWGFRPKRLNFKLFNIQVKEVTQNEGTKTIANNLTSTIQVFTDSEYQLPYVLGSAHQGCLPPFPADVFMIPQYGYLTLNNGSQAVGRSSFYCLEYFPSQMLRTGNNFEFSYTFEDVPFHSSYAHSQSLDRLMNPLIDQYLYYLSRTQTTGGTANTQTLGFSQGGPNTMANQAKNWLPGPCYRQQRVSTTTGQNNNSNFAWTAGTKYHLNGRNSLANPGIAMATHKDDEERFFPSNGILIFGKQNAARDNADYSDVMLTSEEEIKTTNPVATEEYGIVADNLQQQNTAPQIGTVNSQGTLPGMVWQNRDVYLQGPIWAKIPHTDGNFHPSPLMGGFGLKHPPPQILIKNTPVPADPPTTFNQSKLNSFITQYSTGQVSVEIEWELQKENSKRWNPEIQYTSNYYKSTSVDFAVNTEGVYSEPRPIGTRFLTRNL

SEQ ID NO: 3364 - protein, 737 aa, Artificial Sequence
  Synthetic polypeptide
MAADGYLPDWLEDNLSEGIREWWALKPGAPKPKANQQKQDDGRGLVLPGYKYLGPFNGLDKGEPVNAADAAALEHDKAYDQQLKAGDNPYLRYNHADAEFQERLQEDTSFGGNLGRAVFQAKKRVLEPLGLVEEGAKTAPGKKRPVEQSPQEPDSSSGIGKTGQQPAKKRLNFGQTGDSESVPDPQPLGEPPAAPSGVGPNTMAAGGGAPMADNNEGADGVGSSSGNWHCDSTWLGDRVITTSTRTWALPTYNNHLYKQISNGTSGGATNDNTYFGYSTPWGYFDFNRFHCHFSPRDWQRLINNNWGFRPKRLSFKLFNIQVKEVTQNEGTKTIANNLTSTIQVFTDSEYQLPYVLGSAHQGCLPPFPADVFMIPQYGYLTLNNGSQAVGRSSFYCLEYFPSQMLRTGNNFTFSYTFEDVPFHSSYAHSQSLDRLMNPLIDQYLYYLSRTQTTGGTANTQTLGFSQGGPNTMANQAKNWLPGPCYRQQRVSTTTGQNNNSNFAWTAGTKYHLNGRNSLANPGIAMATHKDDEERFFPSNGILIFGKQNAARDNADYSDVMLTSEEEIKTTNPVATEEYGIVADNLQQQNTAPQIGTVNSQGALPGMVWQNRDVYLQGPIWAKIPHTDGNFHPSPLMGGFGLKHPPPQILIKNTPVPADPPTTFNQSKLYSFITQYSTGQVSVEIEWELQKENSKRWNPEIQYTSNYYKSTSVDFAVNTEGVYSEPRPIGTRYLTRNL

SEQ ID NO: 3365 - DNA, 2208 bp, Artificial Sequence
  Synthetic polynucleotide
atggctgccgatggttatcttccagattggctcgaggacaacctctctgagggcattcgcgagtggtgggacttgaaacctggagccccgaaacccaaagccaaccagcaaaagcaggacgacggccggggtctggtgcttcctggctacaagtacctcggacccttcaacggactcgacaagggggagcccgtcaacgcggcggatgcagcggccctcgagcacgacaaagcctacgaccggcagctcgacagcggagacaacccgtacctcaagtacaaccacgccgacgcggagtttcaggagcgccttaaagaagatacgtcttttgggggcaacctcggacgagcagtcttccaggccaagaagagggttctcgaaccttttggtctggttgaggaaggtgctaagacggctcctggaaagaaacgtccggtagagcagtcgccacaagagccagactcctcctcgggcattggcaagacaggccagcagcccgctaaaaagagactcaattttggtcagactggcgactcagagtcagtccccgacccacaacctctcggagaacctccagcaacccccgctgctgtgggacctactacaatggcttcaggtggtggcgcaccagtggcagacaataacgaaggcgccgacggagtgggtagttcctcgggaaattggcattgcgattccacatggctgggcgacagagtcatcaccaccagcacccgaacatgggccttgcccacctataacaaccacctctacaagcaaatctccagtgcttcgacgggggccagcaacgacaaccactacttcggctacagcaccccctgggggtattttgatttcaacaggttccactgccatttctcaccacgtgactggcagcgactcatcaacaacaattggggattccggcccaaaagactcaacttcaagctgttcaacatccaggtcaaggaagtcacgacgaacgaaggcaccaagaccatcgccaataatctcaccagcaccgtgcaggtctttacggactcggagtaccagttaccgtacgtgctaggatccgctcaccagggatgtctgcctccgttcccggcggacgtcttcatggttcctcagtacggctatttaactttaaacaatggaagccaagccctgggacgttcctccttctactgtctggagtatttcccatcgcagatgctgagaacgggcaacaactttacctttagctacaccttcgaggacgtgcctttccacagcagctacgcgcacagccagagcctggacaggctgatgaatcccctcatcgaccagtacctgtactacctggtcagaacgcaaacgactggaactggagggacgcagactctggcattcagccaagcgggtcctagctcaatggccaaccaggctagaaattgggtgcccggaccttgctaccggcagcagcgcgtctccacgacaaccaaccagaacaacaacagcaactttgcctggacgggagctgccaagtttaagctgaacggccgagactctctaatgaatccgggcgtggcaatggcttcccacaaggatgacgacgaccgcttcttcccttcgagcggggtcctgatttttggcaagcaaggagccgggaacgatggagtggattacagccaagtgctgattacagatgaggaagaaatcaaggctaccaaccccgtggccacagaagaatatggagcagtggccatcaacaaccaggccgccaatacgcaggcgcagaccggactcgtgcacaaccagggggtgattcccggcatggtgtggcagaatagagacgtgtacctgcagggtcccatctgggccaaaattcctcacacggacggcaactttcacccgtctcccctgatgggcggctttggactgaagcacccgcctcctcaaattctcatcaagaacacaccggttccagcggacccgccgcttaccttcaaccaggccaagctgaactctttcatcacgcagtacagcaccggacaggtcagcgtggaaatcgagtgggagctgcagaaagaaaacagcaaacgctggaatccagagattcaatacacttccaactactacaaatctacaaatgtggactttgctgtcaacacggagggggtttatagcgagcctcgccccattggcacccgttacctcacccgcaacctgtaa

SEQ ID NO: 3366 - DNA, 2211 bp, Artificial Sequence
  Synthetic polynucleotide
  modified_base (337)..(337): a, c, g, or t
  misc_feature (337)..(337): n is a, c, g, or t
atggctgccgatggttatcttccagattggctcgaggacactctctctgaaggaataagacagtggtggaagctcaaacctggcccaccaccaccaaagcccgcagagcggcataaggacgacagcaggggtcttgtgcttcctggctacaagtacctcggacccttcaacggactcgacaagggggagcccgtcaacgcggcggacgcagcgaccctcgagcacgacaaggcctacgaccagcagctcaaagcgggtgacaatccgtacctgcggtataaccacgccgacgccgagtttcaggagcgtctgcaagaagatacgtcttttgggggcnacctcgggcgagcagtcttccaggccaagaagcgggttctcgaacctctcggtctggttgaggaagctgctaagacggctcctggaaagaagagaccagtagagccatcaccccagcgttctccagactcctctacgggcatcggcaagaaaggccaacagcccgccagaaaaagactcaattttggtcagactggcgactcagagtcagttccagaccctcaacctctcggagaacctccagcagcgccctctggtgtgggacctaatacaatggctgcaggcggtggcgcaccaatggcagacaataacgaaggcgccgacggagtgggtagttcctcgggaaattggcattgcgattccacatggctgggcgacagagtcatcaccaccagcacccgaacctgggccctgcccacctacaacaaccacctctacaagcaaatctccagtgcttcaacgggggccagcaacgacaaccactacttcggctacagcaccccctgggggtattttgatttcaacagattccactgccatttctcaccacgtgactggcagcgactcatcaacaacaattggggattccggcccaagagactcaacttcaagctcttcaacatccaagtcaaggaggtcacgacgaatgatggcgtcacgaccatcgctaataaccttaccagcacggttcaagtcttctcggactcagactatcagctcccgtacgtgctcgggtcggctcacgagggctgcctcccgccgttcccagcggacgttttcatgattcctcagtacggctatttaactttaaacaatggaagccaagccctgggacgttcctccttctactgtctggagtatttcccatcgcagatgctgagaaccggcaacaactttcagttcagctacaccttcgaggacgtgcctttccacagcagctacgcgcacagccagagcctggacaggctgatgaatcccctcatcgaccagtacctgtactacctggtcagaacgcaaacgactggaactggagggacgcagactctggcattcagccaagcgggtcctagctcaatggccaaccaggctagaaattgggtgcccggaccttgctaccggcagcagcgcgtctccacgacaaccaaccagaacaacaacagcaactttgcctggacgggagctgccaagtttaagctgaacggccgagactctctaatgaatccgggcgtggcaatggcttcccacaaggatgacgacgaccgcttcttcccttcgagcggggtcctgatttttggcaagcaaggagccgggaacgatggagtggattacagccaagtgctgattacagatgaggaagaaatcaaggctaccaaccccgtagccacagaagaatatggagcagtggccatcaacaaccaggccgccaatacgcaggcgcagaccggactcgtgcacaaccagggggtgattcccggaatggtgtggcaagacagagacgtatacctgcagggtcctatttgggccaaaattcctcacacggatggacactttcacccgtctcctctcatgggcggctttggacttaagcacccgcctcctcagatcctcatcaaaaacacgcctgttcctgcgaatcctccggcagagttttcggctacaaagtttgcttcattcatcacccagtattccacaggacaagtgagcgtggagattgaatgggagctgcagaaagaaaacagcaaacgctggaatcccgaagtgcagtatacatctaactatgcaaaatctgccaacgttgatttcactgtggacaacaatggactttatactgagcctcgccccattggcacccgttacctcacccgtcccctgtaa

SEQ ID NO: 3367 - DNA, 2214 bp, Artificial Sequence
  Synthetic polynucleotide
  modified_base (335)..(335): a, c, g, or t
  misc_feature (335)..(335): n is a, c, g, or t
atgactgacggttaccttccagattggctagaggacaacctctctgaaggcgttcgagagtggtgggcgctgcaacctggagccccgaagcccaaagccaaccagcaaaagcaggacgacggccggggtctggtgcttcctggctacaagtacctcggacccttcaacggactcgacaagggggagcccgtcaacgcggcggacgcagcggccctcgagcacgacaaggcctacgaccagcagctcaaagcgggtgacaatccgtacctgcggtataaccacgccgacgccgagtttcaggagcgtctgcaagaagatacgtcttttgggggcancctcgggcgagcagtcttccaggccaagaagcgggttctcgaacctctcggtctggttgaggaaggcgctaagacggctcctggaaagaaacgtccggtagagccatcaccccagcgttctccagactcctctacgggcatcggcaagaaaggccaacagcccgccagaaaaagactcaattttggtcagactggcgactcagagtcagttccagaccctcaacctctcggagaacctccagcagcgccctcaggtgtgggatctcttacaatggcttcaggtggtggcgcaccagtggcagacaataacgaaggtgccgatggagtgggtagttcctcgggaaattggcattgcgattcccaatggctgggggacagagtcatcaccaccagcacccgaacctgggccctgcccacctacaacaatcacctctacaagcaaatctccaacagcacatctggaggatcttcaaatgacaacgcctacttcggctacagcaccccctgggggtattttgacttcaacagattccactgccacttctcaccacgtgactggcagcgactcatcaacaacaactggggattccggcccaagagactcagcttcaagctcttcaacatccaggtcaaggaggtcacgcagaatgaaggcaccaagaccatcgccaataacctcaccagcaccatccaggtgtttacggactcggagtaccagctgccgtacgttctcggctctgcccaccagggctgcctgcctccgttcccggcggacgtgttcatgattccccagtacggctacctaacactcaacaacggtagtcaggccgtgggacgctcctccttctactgcctggaatactttccttcgcagatgctgagaaccggcaacaacttccagtttacttacaccttcgaggacgtgcctttccacagcagctacgcccacagccagagcttggaccggctgatgaatcctctgattgaccagtacctgtactacttgtctcggactcaaacaacaggaggcacggcaaatacgcagactctgggcttcagccaaggtgggcctaatacaatggccaatcaggcaaagaactggctgccaggaccctgttaccgccaacaacgcgtctcaacgacaaccgggcaaaacaacaatagcaactttgcctggactgctgggaccaaataccatctgaatggaagaaattcattggctaatcctggcatcgctatggcaacacacaaagacgacgaggagcgtttttttcccagtaacgggatcctgatttttggcaaacaaaatgctgccagagacaatgcggattacagcgatgtcatgctcaccagcgaggaagaaatcaaaaccactaaccctgtggctacagaggaatacggtatcgtggcagataacttgcagcagcaaaacacggctcctcaaattggaactgtcaacagccagggggccttacccggtatggtctggcagaaccgggacgtgtacctgcagggtcccatctgggccaagattcctcacacggacggcaacttccacccgtctccgctgatgggcggctttggcctgaaacatcctccgcctcagatcctgatcaagaacacgcctgtacctgcggatcctccgaccaccttaaaccaggccaagctgaactctttcatcacgcaatacagcaccggacaggtcagcgtggaaattgaatgggagctgcagaaggaaaacagcaagcgctggaacccagagattcagtacacttcaaactactacaaatctacaaatgtggactttgctgtcaatacagagggaacttatagtgaaccccgccccattggcaccagatttctgactcgtaatctgtaa

SEQ ID NO: 3368 - DNA, 2211 bp, Artificial Sequence
  Synthetic polynucleotide
  modified_base (338)..(338): a, c, g, or t
  misc_feature (338)..(338): n is a, c, g, or t
atggctgccgatggttatcttccagattggctcgaggacactctctctgaaggaataagacagtggtggaagctcaaacctggcccaccaccaccaaagcccgcagagcggcataaggacgacagcaggggtcttgtgcttcctgggtacaagtacctcggccccttcaacggactcgacaagggggagcccgtcaacgcggcggacgcagcggccctcgagcacgacaaggcctacgaccagcagctcgaagcgggtgacaatccgtacctgcggtataaccacgccgacgccgagtttcaggagcgtctgcaagaagatacgtcttttgggggcancctcgggcgagcagtcttccaggccaagaagcgggttctcgaacctctcggtctggttgaggaaggcgctaagacggctcctggaaagaagagaccagtagagcagtcaccccaagaaccagactcctcctcgggcatcggcaggaaaggccaacagcccgccagaaaaagactcaattttggccagactggcgactcagagtcagttccagaccctcaacctctcggagaacctccagcagcgccctctggtgtgggacctaatacaatggcttcaggcggtggcgctccaatggcagacaataacgaaggcgccgacggagtgggtaatgcctcaggaaattggcattgcgattccacatggctgggcgacagagtcatcaccaccagcacccgcacctgggccttgcccacctacaataaccacctctacaagcaaatctccagtgcttcaacgggggccagcaacgacaaccactacttcggctacagcaccccctgggggtattttgatttcaacagattccactgccacttttcaccacgtgactggcagcgactcatcaacaacaattggggattccggcccaagagactcaacttcaaactcttcaacatccaggtcaaggaggtcacgcagaatgaaggcactaagaccatcgccaataaccttaccagcacgattcaggtatttacggactcggaataccagctgccgtacgtcctcggctccgcgcaccagggctgcctgcctccgttcccggcggacgtcttcatgattccccagtacggctaccttacactgaacaatggaagtcaagccgtaggccgttcctccttctactgcctggaatattttccatctcaaatgctgcgaactggcaacaacttccagtttacctacaccttcgaggacgtgcctttccacagcagctacgcccacagccagagcttggaccggctgatgaatcctctgattgaccagtacctgtactacttgtctcggactcagtccacaggaggaactcaaggtacccagcaattgttattttctcaagctgggcctgcaaacatgtcggctcaggctaagaactggctacctggaccttgctaccggcagcagcgagtctctacgacactgtcgcaaaacaacaacagcaactttgcttggactggtgccaccaaatatcacctgaacggaagagactctttggtaaatcccggtgtcgccatggcaacccacaaggacgacgaggaacgcttcttcccgtcgagtggagtcctgatgtttggaaaacagggtgctggaagagacaatgtggactacagcagcgttatgctaaccagcgaagaagaaattaaaaccactaaccctgtagccacagaacaatacggtgtggtggttgataacttgcagcaaaccaatacggggcctattgtgggaaatgtcaacagccaaggagccttacctggtatggtctggcagaaccgggacgtgtacctgcagggtcccatctgggccaagattcctcacacggacggcaacttccacccgtctccgctgatgggcggctttggcctgaaacatcctccgcctcagatcctcatcaaaaacacacctgtacctgcggatcctccaacggccttcaacaaggacaagctgaactctttcatcacccagtattctactggccaagtcagcgtggagatcgagtgggagctgcagaaggaaaacagcaagcgctggaacccggagatccagtacacttccaactattacaagtctaataatgttgaatttgctgttaatactgaaggtgtatatagtgaaccccgccccattggcaccagatacctgactcgtaatctgtaa

SEQ ID NO: 3369 - protein, 735 aa, Artificial Sequence
  Synthetic polypeptide
MAADGYLPDWLEDNLSEGIREWWDLKPGAPKPKANQQKQDDGRGLVLPGYKYLGPFNGLDKGEPVNAADAAALEHDKAYDRQLDSGDNPYLKYNHADAEFQERLKEDTSFGGNLGRAVFQAKKRVLEPFGLVEEGAKTAPGKKRPVEQSPQEPDSSSGIGKTGQQPAKKRLNFGQTGDSESVPDPQPLGEPPATPAAVGPTTMASGGGAPVADNNEGADGVGSSSGNWHCDSTWLGDRVITTSTRTWALPTYNNHLYKQISSASTGASNDNHYFGYSTPWGYFDFNRFHCHFSPRDWQRLINNNWGFRPKRLNFKLFNIQVKEVTTNEGTKTIANNLTSTVQVFTDSEYQLPYVLGSAHQGCLPPFPADVFMVPQYGYLTLNNGSQALGRSSFYCLEYFPSQMLRTGNNFTFSYTFEDVPFHSSYAHSQSLDRLMNPLIDQYLYYLVRTQTTGTGGTQTLAFSQAGPSSMANQARNWVPGPCYRQQRVSTTTNQNNNSNFAWTGAAKFKLNGRDSLMNPGVAMASHKDDDDRFFPSSGVLIFGKQGAGNDGVDYSQVLITDEEEIKATNPVATEEYGAVAINNQAANTQAQTGLVHNQGVIPGMVWQNRDVYLQGPIWAKIPHTDGNFHPSPLMGGFGLKHPPPQILIKNTPVPADPPLTFNQAKLNSFITQYSTGQVSVEIEWELQKENSKRWNPEIQYTSNYYKSTNVDFAVNTEGVYSEPRPIGTRYLTRNL

SEQ ID NO: 3370 - protein, 736 aa, Artificial Sequence
  Synthetic polypeptide
  MOD_RES (113)..(113): Any naturally occurring amino acid
MAADGYLPDWLEDTLSEGIRQWWKLKPGPPPPKPAERHKDDSRGLVLPGYKYLGPFNGLDKGEPVNAADAATLEHDKAYDQQLKAGDNPYLRYNHADAEFQERLQEDTSFGGXLGRAVFQAKKRVLEPLGLVEEAAKTAPGKKRPVEPSPQRSPDSSTGIGKKGQQPARKRLNFGQTGDSESVPDPQPLGEPPAAPSGVGPNTMAAGGGAPMADNNEGADGVGSSSGNWHCDSTWLGDRVITTSTRTWALPTYNNHLYKQISSASTGASNDNHYFGYSTPWGYFDFNRFHCHFSPRDWQRLINNNWGFRPKRLNFKLFNIQVKEVTTNDGVTTIANNLTSTVQVFSDSDYQLPYVLGSAHEGCLPPFPADVFMIPQYGYLTLNNGSQALGRSSFYCLEYFPSQMLRTGNNFQFSYTFEDVPFHSSYAHSQSLDRLMNPLIDQYLYYLVRTQTTGTGGTQTLAFSQAGPSSMANQARNWVPGPCYRQQRVSTTTNQNNNSNFAWTGAAKFKLNGRDSLMNPGVAMASHKDDDDRFFPSSGVLIFGKQGAGNDGVDYSQVLITDEEEIKATNPVATEEYGAVAINNQAANTQAQTGLVHNQGVIPGMVWQDRDVYLQGPIWAKIPHTDGHFHPSPLMGGFGLKHPPPQILIKNTPVPANPPAEFSATKFASFITQYSTGQVSVEIEWELQKENSKRWNPEVQYTSNYAKSANVDFTVDNNGLYTEPRPIGTRYLTRPL

SEQ ID NO: 3371 - protein, 737 aa, Artificial Sequence
  Synthetic polypeptide
  MOD_RES (112)..(112): Any naturally occurring amino acid
MTDGYLPDWLEDNLSEGVREWWALQPGAPKPKANQQKQDDGRGLVLPGYKYLGPFNGLDKGEPVNAADAAALEHDKAYDQQLKAGDNPYLRYNHADAEFQERLQEDTSFGGXLGRAVFQAKKRVLEPLGLVEEGAKTAPGKKRPVEPSPQRSPDSSTGIGKKGQQPARKRLNFGQTGDSESVPDPQPLGEPPAAPSGVGSLTMASGGGAPVADNNEGADGVGSSSGNWHCDSQWLGDRVITTSTRTWALPTYNNHLYKQISNSTSGGSSNDNAYFGYSTPWGYFDFNRFHCHFSPRDWQRLINNNWGFRPKRLSFKLFNIQVKEVTQNEGTKTIANNLTSTIQVFTDSEYQLPYVLGSAHQGCLPPFPADVFMIPQYGYLTLNNGSQAVGRSSFYCLEYFPSQMLRTGNNFQFTYTFEDVPFHSSYAHSQSLDRLMNPLIDQYLYYLSRTQTTGGTANTQTLGFSQGGPNTMANQAKNWLPGPCYRQQRVSTTTGQNNNSNFAWTAGTKYHLNGRNSLANPGIAMATHKDDEERFFPSNGILIFGKQNAARDNADYSDVMLTSEEEIKTTNPVATEEYGIVADNLQQQNTAPQIGTVNSQGALPGMVWQNRDVYLQGPIWAKIPHTDGNFHPSPLMGGFGLKHPPPQILIKNTPVPADPPTTLNQAKLNSFITQYSTGQVSVEIEWELQKENSKRWNPEIQYTSNYYKSTNVDFAVNTEGTYSEPRPIGTRFLTRNL

SEQ ID NO: 3372 - protein, 736 aa, Artificial Sequence
  Synthetic polypeptide
  MOD_RES (113)..(113): Any naturally occurring amino acid
MAADGYLPDWLEDTLSEGIRQWWKLKPGPPPPKPAERHKDDSRGLVLPGYKYLGPFNGLDKGEPVNAADAAALEHDKAYDQQLEAGDNPYLRYNHADAEFQERLQEDTSFGGXLGRAVFQAKKRVLEPLGLVEEGAKTAPGKKRPVEQSPQEPDSSSGIGRKGQQPARKRLNFGQTGDSESVPDPQPLGEPPAAPSGVGPNTMASGGGAPMADNNEGADGVGNASGNWHCDSTWLGDRVITTSTRTWALPTYNNHLYKQISSASTGASNDNHYFGYSTPWGYFDFNRFHCHFSPRDWQRLINNNWGFRPKRLNFKLFNIQVKEVTQNEGTKTIANNLTSTIQVFTDSEYQLPYVLGSAHQGCLPPFPADVFMIPQYGYLTLNNGSQAVGRSSFYCLEYFPSQMLRTGNNFQFTYTFEDVPFHSSYAHSQSLDRLMNPLIDQYLYYLSRTQSTGGTQGTQQLLFSQAGPANMSAQAKNWLPGPCYRQQRVSTTLSQNNNSNFAWTGATKYHLNGRDSLVNPGVAMATHKDDEERFFPSSGVLMFGKQGAGRDNVDYSSVMLTSEEEIKTTNPVATEQYGVVVDNLQQTNTGPIVGNVNSQGALPGMVWQNRDVYLQGPIWAKIPHTDGNFHPSPLMGGFGLKHPPPQILIKNTPVPADPPTAFNKDKLNSFITQYSTGQVSVEIEWELQKENSKRWNPEIQYTSNYYKSNNVEFAVNTEGVYSEPRPIGTRYLTRNL

SEQ ID NO: 3373 - DNA, 2211 bp, Artificial Sequence
  Synthetic polynucleotide
atggccgccgacggctacctgcccgactggctggaggacaacctgagcgagggcatccgcgagtggtgggccctgaagcccggcgccccccagcccaaggccaaccagcagcaccaggacaacgcccgcggcctggtgctgcccggctacaagtacctgggccccggcaacggcctggacaagggcgagcccgtgaacgccgccgacgccgccgccctggagcacgacaaggcctacgaccagcagctgaaggccggcgacaacccctacctgaagtacaaccacgccgacgccgagttccaggagcgcctgaaggaggacaccagcttcggcggcaacctgggccgcgccgtgttccaggccaagaagcgcctgctggagcccctgggcctggtggaggaggccgccaagaccgcccccggcaagaagcgccccgtggagcagagcccccaggagcccgacagcagcgccggcatcggcaagagcggcgcccagcccgccaagaagcgcctgaacttcggccagaccggcgacaccgagagcgtgcccgacccccagcccatcggcgagccccccgccgcccccagcggcgtgggcagcctgaccatggccagcggcggcggcgcccccgtggccgacaacaacgagggcgccgacggcgtgggcagcagcagcggcaactggcactgcgacagccagtggctgggcgaccgcgtgatcaccaccagcacccgcacctgggccctgcccacctacaacaaccacctgtacaagcagatcagcaacagcaccagcggcggcagcagcaacgacaacgcctacttcggctacagcaccccctggggctacttcgacttcaaccgcttccactgccacttcagcccccgcgactggcagcgcctgatcaacaacaactggggcttccgccccaagcgcctgaacttcaagctgttcaacatccaggtgaaggaggtgaccgacaacaacggcgtgaagaccatcgccaacaacctgaccagcaccgtgcaggtgttcaccgacagcgactaccagctgccctacgtgctgggcagcgcccacgagggctgcctgccccccttccccgccgacgtgttcatgatcccccagtacggctacctgaccctgaacgacggcagccaggccgtgggccgcagcagcttctactgcctggagtacttccccagccagatgctgcgcaccggcaacaacttccagttcagctacgagttcgagaacgtgcccttccacagcagctacgcccacagccagagcctggaccgcctgatgaaccccctgatcgaccagtacctgtactacctgagcaagaccatcaacggcagcggccagaaccagcagaccctgaagttcagcgtggccggccccagcaacatggccgtgcagggccgcaactacatccccggccccagctaccgccagcagcgcgtgagcaccaccgtgacccagaacaacaacagcgagttcgcctggcccggcgccagcagctgggccctgaacggccgcaacagcctgatgaaccccggccccgccatggccagccacaaggagggcgaggaccgcttcttccccctgagcggcagcctgatcttcggcaagcagggcaccggccgcgacaacgtggacgccgacaaggtgatgatcaccaacgaggaggagatcaagaccaccaaccccgtggccaccgagagctacggccaggtggccaccaaccaccagagcgcccaggcccaggcccagaccggctgggtgcagaaccagggcatcctgcccggcatggtgtggcaggaccgcgacgtgtacctgcagggccccatctgggccaagatcccccacaccgacggcaacttccaccccagccccctgatgggcggcttcggcatgaagcacccccccccccagatcctgatcaagaacacccccgtgcccgccgacccccccaccgccttcaacaaggacaagctgaacagcttcatcacccagtacagcaccggccaggtgagcgtggagatcgagtgggagctgcagaaggagaacagcaagcgctggaaccccgagatccagtacaccagcaactactacaagagcaacaacgtggagttcgccgtgaacaccgagggcgtgtacagcgagccccgccccatcggcacccgctacctgacccgcaacctgtaa

SEQ ID NO: 3374 - DNA, 2211 bp, Artificial Sequence
  Synthetic polynucleotide
atggctgccgatggttatcttccagattggctcgaggacactctctctgaaggaataagacagtggtggaagctcaaacctggcccaccaccaccaaagcccgcagagcggcataaggacgacagcaggggtcttgtgcttcctgggtacaagtacctcggacccttcaacggactcgacaagggagagccggtcaacgaggcagacgccgcggccctcgagcacgacaaggcctacgaccagcagctcaaggccggagacaacccgtacctcaagtacaaccacgccgacgccgagttccaggagcggctcaaagaagatacgtcttttgggggcaacctcggacgagcagtcttccaggccaagaagcgggttctcgaacctctcggtctggttgaggaaggcgctaagacggctcctggaaagaaacgtccggtagagcagtcgccacaagagccagactcctcctcgggcattggcaagacaggccagcagcccgctaaaaagagactcaattttggtcagactggcgactcagagtcagtccccgacccacaacctctcggagaacctccagcaacccccgctgctgtgggacctactacaatggcttcaggcggtggcgcaccaatggcggacaataacgaaggcgccgatggagtgggtagttcctcgggaaattggcattgcgattcccaatggctgggggacagagtcatcaccaccagcacccgaacatgggccttgcccacctataacaaccacctctacaagcaaatctccagtgcttcaacgggggccagcaacgacaaccactacttcggctacagcaccccctgggggtattttgacttcaacagattccactgccacttctcaccacgtgactggcagcgactcatcaacaacaactggggattccgacccaagagactcaacttcaagctctttaacattcaagtcaaggaggtcacgcagaatgaaggcaccaagaccatcgccaataacctcaccagcaccatccaggtgtttacggactcggagtaccagctgccgtacgttctcggctccgcccaccagggctgcctgcctccgttcccggcggacgtgttcatgattccccagtacggctacctaacactcaacaacggtagtcaggccgtgggacgctcctccttctactgcctggaatactttccttcgcagatgctgagaaccggcaacaacttccagtttacttacaccttcgaggacgtgcctttccacagcagctacgcccacagccagagcttggaccggctgatgaatcctctgattgaccagtacctgtactacttgtctcggactcaaacaacaggaggcacggcaaatacgcagactctgggcttcagccaaggtgggcctaatacaatggccaatcaggcaaagaactggctgccaggaccctgttaccgccaacaacgcgtctcaacgacaaccgggcaaaacaacaatagcaactttgcctggactgctgggaccaaataccatctgaatggaagaaattcattggctaatcctggcatcgctatggcaacacacaaagacgacaaggagcgtttttttcccagtaacgggatcctgatttttggcaaacaaaatgctgccagagacaatgcggattacagcgatgtcatgctcaccagcgaggaagaaatcaaaaccactaaccctgtggctacagaggaatacggtatcgtggcagataacttgcagcagcaaaacacggctcctcaaattggaactgtcaacagccagggggccttacccggtatggtctggcagaaccgggacgtgtacctgcagggtcccatctgggccaagattcctcacacggacggcaacttccacccgtctccgctgatgggcggctttggcctgaaacatcctccgcctcagatcctgatcaagaacacgcctgtacctgcggatcctccgaccaccttcaaccagtcaaagctgaactctttcatcacgcaatacagcaccggacaggtcagcgtggaaattgaatgggagctgcagaaagaaaacagcaaacgctggaacccagagattcaatacacttccaactactacaaatctacaagtgtggactttgctgttaatacagaaggcgtgtactctgaaccccaccccattggcacccgttacctcacccgtcccctgtaa

SEQ ID NO: 3375 - DNA, 2211 bp, Artificial Sequence
  Synthetic polynucleotide
atggctgccgatggttatcttccagattggctcgaggacaacctctctgagggcattcgcgagtggtgggcgctgaaacctggagccccgaagcccaaagccaaccagcaaaagcaggacgacggccggggtctggtgcttcctggctacaagtacctcggacccttcaacggactcgacaagggggagccggtcaacgcagcagacgcggcggccctcgagcacgacaaggcctacgaccagcagctcaaggccggagacaacccgtacctcaagtacaaccacgccgacgccgagttccaggagcggctcaaagaagatacgtcttttgggggcaacctcgggcgagcagtcttccaggccaaaaagaggcttcttgaacctcttggtctggttgaggaagcggctaagacggctcctggaaagaagaggcctgtagagcagtctcctcaggaaccggactcctccgcgggtattggcaaatcgggtgcacagcccgctaaaaagagactcaattttggtcagactggcgactcagagtcagtccccgacccacaacctctcggagaacctccagcaacccccgctgctgtgggacctactacaatggcttcaggcggtggcgcaccaatggcagacaataacgaaggcgccgacggagtgggtaatgcctcaggaaattggcattgcgattccacatggctgggcgacagagtcatcaccaccagcacccgaacctgggccctgcccacctacaataaccacctctacaagcaaatctccagtgcttcaacgggggccagcaacgacaaccactacttcggctacagcaccccctgggggtattttgatttcaacagattccactgccacttttcaccacgtgactggcagcgactcatcaacaacaattggggattccggcccaagagactcaacttcaaactcttcaacatccaagtcaaggaggtcacgcagaatgaaggcaccaagaccatcgccaataacctcaccagcaccatccaggtgtttacggactcggagtaccagctgccgtacgttctcggctctgcccaccagggctgcctgcctccgttcccggcggacgtgttcatgattccccagtacggctacctaacactcaacaacggtagtcaggccgtgggacgctcctccttctactgcctggaatactttccttcgcagatgctgagaaccggcaacaacttccagtttacttacaccttcgaggacgtgcctttccacagcagctacgcccacagccagagcttggaccggctgatgaatcctctgattgaccagtacctgtactacttgtctcggactcaaacaacaggaggcacggcaaatacgcagactctgggcttcagccaaggtgggcctaatacaatggccaatcaggcaaagaactggctgccaggaccctgttaccgccaacaacgcgtctcaacgacaaccgggcaaaacaacaatagcaactttgcctggactgctgggaccaaataccatctgaatggaagaaattcattggctaatcctggcatcgctatggcaacacacaaagacgacaaggagcgtttttttcccagtaacgggatcctgatttttggcaaacaaaatgctgccagagacaatgcggattacagcgatgtcatgctcaccagcgaggaagaaatcaaagccactaaccctgtggctacagaggaatacggtatcgtggcagataacttgcagcagcaaaacacggctcctcaaattggaactgtcaacagccagggggccttacccggtatggtttggcagaaccgggacgtgtacctgcagggtcccatctgggccaagattcctcacacggacggcaacttccacccgtctccgctgatgggcggctttggcctgaaacatcctccgcctcagatcctgatcaagaacacgcctgtacctgcggatcctccgaccaccttcaaccagtcaaagctgaactctttcatcacgcaatacagcaccggacaggtcagcgtggaaattgaatgggagctgcagaaggaaaacagcaagcgctggaaccccgagatccagtacacctccaactactacaaatctacaagtgtggactttgctgttaatacagaaggcgtgtactctgaaccccaccccattggcacccgttacctcacccgtcccctgtaa

SEQ ID NO: 3376 - DNA, 2214 bp, Artificial Sequence
  Synthetic polynucleotide
atggctgccgatggttatcttccagattggctcgaggacaacctctctgagggcattcgcgagtggtgggacttgaaacctggagccccgaagcccaaagccaaccagcaaaagcaggacgacggccggggtctggtgcttcctggctacaagtacctcggacccttcaacggactcgacaagggggagcccgtcaacgcggcggacgcagcggccctcgagcacgacaaggcctacgaccagcagctcaaagcgggtgacaatccgtacctgcggtataaccacgccgacgccgagtttcaggagcgtctgcaagaagatacgtcttttgggggcaacctcgggcgagcagtcttccaggccaagaagcgggttctcgaacctctcggtctggttgaggaaggcgctaatacggctcctggaaagaaacgtccggtagagcagtcgccacaagagccagactcctccgcgggtattggcaaatcgggtgcacagcccgctaaaaagagactcaatttcggtcagactggcgacacagagtcagtcccagaccctcaaccaatcggagaacctcccgcagccccctcaggtgtgggatctcttacaatggcttcaggtggtggcgcaccagtggcagacaataacgaaggtgccgatggagtgggtagttcctcgggaaattggcattgcgattcccaatggctgggggacagagtcatcaccaccagcacccgaacctgggccctgcccacctacaacaatcacctctacaagcaaatctccaacagcacatctggaggatcttcaaatgacaacgcctacttcggctacagcaccccctgggggtattttgacttcaacagattccactgccacttctcaccacgtgactggcagcgactcatcaacaacaactggggattccggcctaagcgactcaacttcaagctcttcaacattcaggtcaaagaggttacggacaacaatggagtcaagaccatcgccaataacctcaccagcaccatccaggtgtttacggactcggagtaccagctgccgtacgttctcggctccgcccaccagggctgcctgcctccgttcccggcggacgtgttcatgattccccagtacggctacctaacactcaacaacggtagtcaggccgtgggacgctcctccttctactgcctggaatactttccttcgcagatgctgagaaccggcaacaacttccagtttacttacaccttcgaggacgtgcctttccacagcagctacgcccacagccagagcttggaccggctgatgaatcctctgattgaccagtacctgtactacttgtctcggactcaaacaacaggaggcacggcaaatacgcagactctgggcttcagccaaggtgggcctaatacaatggccaatcaggcaaagaactggctgccaggaccctgttaccgccaacaacgcgtctcaacgacaaccgggcaaaacaacaatagcaactttgcctggactgctgggaccaaataccatctgaatggaagaaattcattggctaatcctggcatcgctatggcctcacacaaagacgacaaggagcgtttttttcccagtaacgggatcctgatttttggcaaacaaaatgctgccagagacaatgcggattacagcgatgtcatgctcaccagcgaggaagaaatcaaaaccactaaccctgtggctacagaggaatacggtatcgtggcagataacttgcagcagcaaaacacggctcctcaaattggaactgtcaacagtcaaggagccttacctggcatggtctggcagaaccgggacgtgtacctgcagggtcccatctgggccaagattcctcacacggacggcaacttccacccgtctccgctgatgggcggctttggcctgaaacatcctccgcctcagatcctgatcaagaacacgcctgtacctgcggatcctccgaccaccttcaaccagtcaaagctgaactctttcatcacgcaatacagcaccggacaggtcagcgtggaaattgaatgggagctgcagaaggaaaacagcaagcgctggaaccccgagatccagtacaccaccaactactacaaatctacaagtgtggactttgctgttaatacagaaggcgtgtactctgaaccccaccccattggcacccgttacctcacccgtcccctgtaa

SEQ ID NO: 3377 - DNA, 2211 bp, Artificial Sequence
  Synthetic polynucleotide
atggctgccgatggttatcttccagattggctcgaggacaacctctctgagggcattcgcgagtggtgggcgctgaaacctggagccccgaagcccaaagccaaccagcaaaagcaggacgacggccggggtctggtgcttcctggctacaagtacctcggacccttcaacggactcgacaaaggagagccggtcaacgaggcggacgcggcagccctcgaacacgacaaagcttacgaccagcagctcaaggccggtgacaatccgtacctgcggtataaccacgccgacgccgagtttcaggagcgtcttcaagaagatacgtcttttgggggcaacctcgggcgagcagtcttccaggccaagaagcgggttctcgaacctctcggtctggttgaggaaggcgctaagacggctcctggaaagaaacgtccggtagagcagtcgccacaagagccagactcctcctcgggcatcggcaagacaggccagcagcccgctaaaaagagactcaattttggtcagactggcgactcagagtcagtccccgacccacaacctctcggagaacctccagcaacccccgctgctgtgggacctactacaatggcttcaggcggtggcgcaccaatggcagacaataacgaaggcgccgacggagtgggtaatgcctcaggaaattggcattgcgattccacatggctgggcgacagagtcatcaccaccagcacccgcacctgggccttgcccacctacaataaccacctctacaagcaaatctccagtgcttcaacgggggccagcaacgacaaccactacttcggctacagcaccccctgggggtattttgactttaacagattccactgccacttttcaccacgtgactggcaaagactcatcaacaacaactggggattccggcccaagagactcaacttcaagctcttcaacatccaggtcaaggaggtcacgcagaatgaaggcaccaagaccatcgccaataaccttaccagcacgattcaggtctttacggactcggaataccagctcccgtacgtcctcggctctgcgcaccagggctgcctccctccgttcccggcggacgtgttcatgattccgcagtacggctacctaacactcaacaacggtagtcaggccgtgggacgctcctccttctactgcctggaatactttccttcgcagatgctgagaaccggcaacaacttccagtttacttacaccttcgaggacgtgcctttccacagcagctacgcccacagccagagcttggaccggctgatgaatcctctgattgaccagtacctgtactacttgtctcggactcaaacaacaggaggcacggcaaatacgcagactctgggcttcagccaaggtgggcctaatacaatggccaatcaggcaaagaactggctgccaggaccctgttaccgccaacaacgcgtctcaacgacaaccgggcaaaacaacaatagcaactttgcctggactgctgggaccaaataccatctgaatggaagaaattcattggctaatcctggcatcgctatggcaacacacaaagacgacaaggagcgtttttttcccagtaacgggatcctgatttttggcaaacaaaatgctgccagagacaatgcggattacagcgatgtcatgctcaccagcgaggaagaaatcaaaaccactaaccctgtggctacagaggaatacggtatcgtggcagataacttgcagcagcaaaacacggctcctcaaattggaactgtcaacagccagggggccttacccggtatggtctggcagaaccgggacgtgtacctgcagggtcccatctgggccaagattcctcacacggacggcaacttccacccgtctccgctgatgggcggctttggcctgaaacatcctccgcctcagatcctgatcaagaacacgcctgtacctgcggatcctccgaccaccttcaaccagtcaaagctgaactctttcatcacgcaatacagcaccggacaggtcagcgtggaaattgaatgggagctgcagaaggaaaacagcaagcgctggaaccccgagatccagtacacctccaactactacaaatctacaagtgtggactttgctgttaatacagaaggcgtgtactctgaaccccaccccattggcacccgttacctcacccgtcccctgtaa

SEQ ID NO: 3378 - DNA, 2211 bp, Artificial Sequence
  Synthetic polynucleotide
atggctgccgatggttatcttccagattggctcgaggacaacctctctgagggcattcgcgagtggtgggcgctgaaacctggagccccgaagcccaaagccaaccagcaaaagcaggacgacggccggggtctggtgcttcctggctacaagtacctcggacccttcaacggactcgacaaaggagagccggtcaacgaggcggacgcggcagccctcgaacacgacaaagcttacgaccagcagctcaaagcgggtgacaatccgtacctgcggtataaccacgccgacgccgagtttcaggagcgtctgcaagaagatacgtcttttgggggcaacctcgggcgagcagtcttccaggccaagaagagggttctcgaaccttttggtctggttgaggaaggtgctaagacggctcctggaaagaaacgtccggtagagcagtcgccacaagagccagactcctcctcgggcattggcaagacaggccagcagcccgctaaaaagagactcaattttggtcagactggcgactcagagtcagtccccgacccacaacctctcggagaacctccagcaacccccgctgctgtgggacctactacaatggcttcaggcggtggcgcaccaatggcagacaataacgaaggcgccgacggagtgggtaatgcctcaggaaattggcattgcgattcccaatggctgggcgacagagtcatcaccaccagcaccagaacctgggccttgcccacctataacaaccacctctacaagcaaatctccagtgcttcaacgggggccagcaacgacaaccactacttcggctacagcaccccctgggggtattttgatttcaacagattccactgccacttctcaccacgtgactggcagcgactcatcaacaacaactggggattccggcctaagcgactcaacttcaagctcttcaacattcaggtcaaagaggttacggacaacaatggagtcaagaccatcgccaataaccttaccagcacggttcaagtcttctcggactcggagtaccagttgccgtacgtcctcggctctgcgcaccagggctgcctccctccgttcccggcggacgtgttcatgattccccagtacggctacctaacactcaacaacggtagtcaggccgtgggacgctcctccttctactgcctggaatactttccttcgcagatgctgagaaccggcaacaacttccagtttacttacaccttcgaggacgtgcctttccacagcagctacgcgcacagccagagcttggaccggctgatgaatcctctgattgaccagtacctgtactacttgtctcggactcaaacaacaggaggcacggcaaatacgcagactctgggcttcagccaaggtgggcctaatacaatggccaatcaggcaaagaactggctgccaggaccctgttaccgccaacaacgcgtctcaacgacaaccgggcaaaacaacaatagcaactttgcctggactgctgggaccaaataccatctgaatggaagaaattcattggctaatcctggcatcgctatggcaacacacaaagacgacaaggagcgtttttttcccagtaacgggatcctgatttttggcaaacaaaatgctgccagagacaatgcggattacagcgatgtcatgctcaccagcgaggaagaaatcaaaaccactaaccctgtggctacagaggaatacggtatcgtggcagataacttgcagcagcaaaacacggctcctcaaattggaactgtcaacagccagggggccttacccggtatggtctggcagaaccgggacgtgtacctgcagggtcccatctgggccaagattcctcacacggacggcaacttccacccgtctccgctgatgggcggctttggcctgaaacatcctccgcctcagatcctgatcaagaacacgcctgtacctgcggatcctccgaccaccttcaaccagtcaaagctgaactctttcatcacgcaatacagcaccggacaggtcagcgtggaaattgaatgggagctgcagaaggaaaacagcaagcgctggaaccccgagatccagtacacctccaactactacaaatctacaagtgtggactttgctgttaatacagaaggcgtgtactctgaaccccaccccattggcacccgttacctcacccgtcccctgtaa

SEQ ID NO: 3379 - DNA, 2244 bp, Artificial Sequence
  Synthetic polynucleotide
  modified_base (2241)..(2241): a, c, g, or t
  misc_feature (2241)..(2241): n is a, c, g, or t
atggctgccgatggttatcttccagattggctcgaggacactctctctgaaggaataagacagtggtggaagctcaaacctggcccaccaccaccaaagcccgcagagcggcataaggacgacagcaggggtcttgtgcttcctgggtacaagtacctcggacccttcaacggactcgacaagggagagccggtcaacgaggcagacgccgcggccctcgagcacgacaaagcctacgaccggcagctcgacagcggagacaacccgtacctcaagtacaaccacgccgacgcggagtttcaggagcgccttaaagaagatacgtcttttgggggcaacctcgggcgagcagtcttccaggccaagaagagggttctcgaaccttttggtctggttgaggaaggtgctaagacggctcctggaaagaaacgtccggtagagcagtcgccacaagagccagactcctcctcgggcattggcaagacaggccagcagcccgctaaaaagagactcaattttggtcagactggcgactcagagtcagtccccgacccacaacctctcggagaacctccagcaacccccgctgctgtgggacctactacaatggcttcaggcggtggcgcaccaatggcagacaataacgaaggcgccgacggagtgggtaatgcctcaggaaattggcattgcgattccacatggctgggcgacagagtcatcaccaccagcacccgaacatgggccttgcccacctataacaaccacctctacaagcaaatctccagtgcttcaacgggggccagcaacgacaaccactacttcggctacagcaccccctgggggtattttgacttcaacagattccactgccacttctcaccacgtgactggcagcgactcatcaacaacaactggggattccggcctaagcgactcaacttcaagctcttcaacattcaggtcaaagaggttacggacaacaatggagtcaagaccatcgccaataaccttaccagcacggtccaggtcttcacggactcagactatcagctcccgtacgtgctcgggtcggctcacgagggctgcctcccgccgttcccagcggacgttttcatgattcctcagtacggctacctaacactcaacaacggtagtcaggccgtgggacgctcctccttctactgcctggaatactttccttcgcagatgctgagaaccggcaacaacttccagtttacttacaccttcgaggacgtgcctttccacagcagctacgcgcacagccagagcttggaccggctgatgaatcctctgattgaccagtacctgtactacttgtctcggactcaaacaacaggaggcacggcaaatacgcagactctgggcttcagccaaggtgggcctaatacaatggccaatcaggcaaagaactggctgccaggaccctgttaccgccaacaacgcgtctcaacgacaaccgggcaaaacaacaatagcaactttgcctggactgctgggaccaaataccatctgaatggaagaaattcattggctaatcctggcatcgctatggcaacacacaaagacgacaaggagcgtttttttcccagtaacgggatcctgatttttggcaaacaaaatgctgccagagacaatgcggattacagcgatgtcatgctcaccagcgaggaagaaatcaaaaccactaaccctgtggctacagaggaatacggtatcgtggcagataacttgcagcagcaaaacacggctcctcaaattggaactgtcaacagccagggggccttacccggtatggtctggcagaaccgggacgtgtacctgcagggtcccatctgggccaagattcctcacacggacggcaacttccacccgtctccgctgatgggcggctttggcctgaaacatcctccgcctcagatcctgatcaagaacacgcctgtacctgcggatcctccgaccaccttcaaccagtcaaagctgaactctttcatcacgcaatacagcaccggacaggtcagcgtggaaattgaatgggagctgcagaaggaaaacagcaagcgctggaaccccgagatccagtacacctccaactactacaaatctacaagtgtggactttgctgttaatacagaaggcgtgtactctgaaccccaccccattggcaccagatacctgactcgtaatctgtaattgcttgttaatcaataaaccgtttaattnttt

SEQ ID NO: 3380 - DNA, 2217 bp, Artificial Sequence
  Synthetic polynucleotide
atggctgccgatggttatcttccagattggctcgaggacaacctctctgagggcattcgcgagtggtgggacttgaaacctggagccccgaaacccaaagccaaccagcaaaagcaggacgacggccggggtctggtgcttcctggctacaagtacctcggacccttcaacggactcgacaagggggagcccgtcaacgcggcggacgcagcggccctcgagcacgacaaggcctacgaccagcagctccaagcgggtgacaatccgtacctgcggtataaccacgccgacgccgagtttcaggagcgtctgcaagaagatacgtcttttgggggcaacctcggacgagcagtcttccaggcgaaaaagagggttctcgaacctctcggtctggttgaggaaggcgctaagacggctcctggaaagaagagaccggtagagccatcaccccagcgttctccagactcctctacgggcatcggcaagaaaggccaacagcccgccagaaaaagactcaattttggtcagactggcgactcagagtcagttccagaccctcaacctctcggagaacctccagcagcgccctctggtgtgggacctaatacaatggctgcaggcggtggcgcaccaatggcagacaataacgaaggcgccgacggagtgggtagttcctcgggaaattggcattgcgattcccaatggctgggggacagagtcatcaccaccagcacccgaacctgggccctgcccacctacaacaatcacctctacaagcaaatctccaacagcacatctggaggatcttcaaatgacaacgcctacttcggctacagcaccccctgggggtattttgacttcaaccgcttccactgccacttctcaccacgtgactggcagcgactcatcaacaacaactggggattccggcccaagagactcagcttcaaactcttcaacatccaggtcaaggaggtcacgcagaatgaaggcaccaagaccatcgccaataacctcaccagcaccatccaggtgtttacggactcggagtaccagctgccgtacgttctcggctctgcccaccagggctgcctgcctccgttcccggcggacgtgttcatgattcctcagtacggctacctaacgctcaacaatggcagccaggcagtgggacggtcatccttttactgcctggaatatttcccatcgcagatgctgagaacgggcaacaactttaccttcagctacacctttgaggacgttcctttccacagcagctacgctcacagccagagtctggaccgtctcatgaatcctctgattgaccagtacctgtactacttgtctcggactcaaacaacaggaggcacggcaaatacgcagactctgggcttcagccaaggtgggcctaatacaatggccaatcaggcaaagaactggctgccaggaccctgttaccgccaacaacgcgtctcaacgacaaccgggcaaaacaacaatagcaactttgcctggactgctgggaccaaataccatctgaatggaagaaattcattggctaatcctggcatcgctatggcaacacacaaagacgacaaggagcgtttttttcccagtaacgggatcctgatttttggcaaacaaaatgctgccagagacaatgcggattacagcgatgtcatgctcaccagcgaggaagaaatcaaaaccactaaccctgtggctacagaggaatacggtatcgtggcagataacttgcagcagcaaaacacggctcctcaaattggaactgtcaacagccagggggccttacccggtatggtctggcagaaccgggacgtgtacctgcagggtcccatctgggccaagattcctcacacggacggcaacttccacccgtctccgctgatgggcggctttggacttaagcacccgcctcctcagatcctcatcaaaaacacgcctgttcctgcggatcctccgaccaccttcaaccagtcaaagctgaactctttcatcacgcaatacagcaccggacaggtcagcgtggaaattgaatgggagctgcagaaggaaaacagcaagcgctggaaccccgagatccagtacacctccaactactacaaatctacaagtgtggactttgctgttaatacagaaggcgtgtactctgaaccccaccccattggcacccgttacctcacccgtcccctgtaa

SEQ ID NO: 3381 - DNA, 2214 bp, Artificial Sequence
  Synthetic polynucleotide
atggctgccgatggttatcttccagattggctcgaggacaacctctctgagggcattcgcgagtggtgggacttgaaacctggagccccgaagcccaaagccaaccagcaaaagcaggacgacggccggggtctggtgcttcctggctacaagtacctcggacccttcaacggactcgacaagggggagcccgtcaacgcggcggatgcagcggccctcgagcacgacaaagcctacgaccagcagctcaaagcgggtgacaatccgtacctgcggtataaccacgccgacgccgagtttcaggagcgtctgcaagaagatacgtcttttgggggcaacctcgggcgagcagtcttccaggccaagaagagggttctcgaaccttttggtctggttgaggaaggtgctaagacggctcctggaaagaaacgtccggtagagcagtcgccacaagagccagactcctcctcgggcattggcaagacaggccagcagcccgctaaaaagagactcaattttggtcagactggcgactcagagtcagtccccgacccacaacctctcggagaacctccagcaacccccgctgctgtgggacctactacaatggcttcaggcggtggcgcacccatgcaagacaataacgaaggcgccgacggagtgggtagttcctcgggaaattggcattgcgattccacatggctgggcgacagagtcatcaccaccagcacccgaacctgggccctgcccacctacaacaaccacctctacaagcaaatctccaacgggacatcgggaggagccaccaacgacaacacctacttcggctacagcaccccctgggggtattttgactttaacagattccactgccacttttcaccacgtgactggcagcgactcatcaacaacaactggggattccggcccaagagactcaacttcaagctcttcaacatccaggtcaaggaggtcacgcagaatgaaggcaccaagaccatcgccaataaccttaccagcacgattcaggtctttacggattcggaataccagctcccgtacgtcctcggctctgcgcaccagggctgcctccctccgttcccggcggacgtgttcatgattccgcagtacggctacctaacgctcaacaatggtagccaggcagtgggacggtcatccttttactgcctggaatatttcccatcgcagatgctgagaacgggcaacaactttaccttcagctacacctttgaggacgttcctttccacagcagctacgctcacagccagagtctggaccgtctcatgaatcctctgattgaccagtacctgtactacttgtctcggactcaaacaacaggaggcacggcaaatacgcagactctgggcttcagccaaggtgggcctaatacaatggccaatcaggcaaagaactggctgccaggaccctgttaccgccaacaacgcgtctcaacgacaaccgggcaaaacaacaatagcaactttgcctggactgctgggaccaaataccatctgaatggaagaaattcattggctaatcctggcatcgctatggcaacacacaaagacgacaaggagcgtttttttcccagtaacgggatcctgatttttggcaaacaaaatgctgccagagacaatgcggattacagcgatgtcatgctcaccagcgaggaagaaatcaaaaccactaaccctgtggctacagaggaatacggtatcgtggcagataacttgcagcagcaaaacacggctcctcaaattggaactgtcaacagccagggggccttacccggtatggtctggcagaaccgggacgtgtacctgcagggtcccatctgggccaagattcctcacacggacggcaacttccacccgtctccgctgatgggcggctttggcctgaaacatcctccgcctcagatcctgatcaagaacacgcctgtacctgcggatcctccgaccaccttcaaccagtcaaagctgaactctttcatcacgcaatacagcaccggacaggtcagcgtggaaattgaatgggagctgcagaaggaaaacagcaagcgctggaaccccgagatccagtacacctccaactactacaaatctacaagtgtggactttgctgttaatacagaaggcgtgtactctgaaccccaccccattggcacccgttacctcacccgtcccctgtaa

SEQ ID NO: 3382 - DNA, 2211 bp, Artificial Sequence
  Synthetic polynucleotide
atggctgccgatggttatcttccagattggctcgaggacaacctctctgagggcattcgcgagtggtgggcgctgaaacctggagccccgaagcccaaagccaaccagcaaaagcaggacgacggccggggtctggtgcttcctggctacaagtacctcggacccttcaacggactcgacaagggggagcccgtcaacgcggcggacgcagcggccctcgagcacgacaaggcctacgaccagcagctcaaagcgggtgacaatccgtacctgcggtataaccacgccgacgccgagtttcaggagcgtctgcaagaagatacgtcttttgggggcaacctcgggcgagcagtcttccaggccaagaagcgggttctcgaacctctcggtctggttgaggaaggcgctaagacggctcctggaaagaaacgtccggtagagcagtcgccacaagagccagactcctcctcgggcatcggcaagacaggccagcagcccgctaaaaagagactcaattttggtcagactggcgactcagagtcagtccccgacccacaacctctcggagaacctccagcaacccccgctgctgtgggacctactacaatggcttcaggcggtggcgcaccaatggcagacaataacgaaggcgccgacggagtgggtagttcctcgggaaattggcattgcgattccacatggctgggcgacagagtcatcaccaccagcacccgcacctgggccttgcccacctacaataaccacctctacaagcaaatctccagtgcttcaacgggggccagcaacgacaaccactacttcggctacagcaccccctgggggtattttgacttcaacagattccactgccacttctcaccacgtgactggcagcgactcatcaacaacaactggggattccggcctaagcgactcaacttcaagctcttcaacattcaggtcaaagaggttacggacaacaatggagtcaagaccatcgccaataaccttaccagcacggtccaggtcttcacggactcagactatcagctcccgtacgtgctcgggtcggctcacgagggctgcctcccgccgttcccagcggacgttttcatgattcctcagtacgggtatctgacgctcaacaatggcagccaggcagtgggacggtcatccttttactgcctggaatatttcccatcgcagatgctgagaacgggcaataactttaccttcagctacaccttcgaggacgtgcctttccacagcagctacgcgcacagccagagcctggaccggctgatgaatcctctgattgaccagtacctgtactacttgtctcggactcaaacaacaggaggcacggcaaatacgcagactctgggcttcagccaaggtgggcctaatacaatggccaatcaggcaaagaactggctgccaggaccctgttaccgccaacaacgcgtctcaacgacaaccgggcaaaacaacaatagcaactttgcctggactgctgggaccaaataccatctgaatggaagaaattcattggctaatcctggcatcgctatggcaacacacaaagacgacaaggagcgtttttttcccagtaacgggatcctgatttttggcaaacaaaatgctgccagagacaatgcggattacagcgatgtcatgctcaccagcgaggaagaaatcaaaaccactaaccctgtggctacagaggaatacggtatcgtggcagataacttgcagcagcaaaacacggctcctcaaattggaactgtcaacagccagggggccttacccggtatggtctggcagaaccgggacgtgtacctgcagggtcccatctgggccaagattcctcacacggacggcaacttccacccgtctccgctgatgggcggctttggcctgaaacatcctccgcctcagatcctgatcaagaacacgcctgtacctgcggatcctccgaccaccttcaaccagtcaaagctgaactctttcatcacgcaatacagcaccggacaggtcagcgtggaaattgaatgggagctgcagaaggaaaacagcaagcgctggaaccccgagatccagtacacctccaactactacaaatctacaagtgtggactttgctgttaatacagaaggcgtgtactctgaaccccaccccattggcacccgttacctcacccgtcccctgtaa

SEQ ID NO: 3383 - DNA, 2214 bp, Artificial Sequence
  Synthetic polynucleotide
atggctgccgatggttatcttccagattggctcgaggacaacctctctgagggcattcgcgagtggtgggacttgaaacctggagccccgaaacccaaagccaaccagcaaaagcaggacgacggccggggtctggtgcttcctggctacaagtacctcggacccttcaacggactcgacaagggggagcccgtcaacgcggcggatgcagcggccctcgagcacgacaaggcctacgaccagcagctcaaagcgggtgacaatccgtacctgcggtataaccacgccgacgccgagtttcaggagcgtctgcaagaagatacgtcttttgggggcaacctcgggcgagcagtcttccaggccaagaagcgggttctcgaacctctcggtctggttgaggaaggcgctaagacggctcctggaaagaagagaccggtagagccatcaccccagcgttctccagactcctctacgggcatcggcaagaaaggccaacagcccgccagaaaaagactcaattttggtcagactggcgactcagagtcagtccccgacccacaacctctcggagaacctccagcaacccccgctgctgtgggacctactacaatggcttcaggcggtggcgcaccaatggcagacaataacgaaggcgccgacggagtgggtaatgcctcaggaaattggcattgcgattccacatggctgggcgacagagtcatcaccaccagcacccgaacatgggccttgcccacctataacaaccacctctacaagcaaatctccagtgcttcaacgggggccagcaacgacaaccactacttcggctacagcaccccctgggggtattttgatttcaacagattccactgccatttctcaccacgtgactggcagcgactcatcaacaacaatttgggatcccggcccaagagactcaacttcaagctcttcatcatccaagtcaaggaggtcacgacgaatgatggcgtcacgaccatcgctaataaccttaccagcacggttcaagtcttctcggactcggagtaccagttgccgtacgtcctcggctctgcgcaccagggctgcctccctccgttcccggcggacgtgttcatgattccgcagtacggctacctaacgctcaacaatggcagccaggcagtgggacggtcatccttttactgcctggaatatttcccatcgcagatgctgagaacgggcaataactttaccttcagctacaccttcgaggacgtgcctttccacagcagctacgcgcacagccagagcctggaccggctgatgaatcctctcatcgaccagtacctgtattacctgaacagaactcagaatcagtccggaagtgcccaaaacaaggacttgctgtttagccgggggtctccagctggcatgtctgttcagcccaaaaactggctacctggaccctgttaccggcagcagcgcgtttctaaaacaaaaacagacaacaacaacagcaactttacctggactggtgcttcaaaatataaccttaatgggcgtgaatctataatcaaccctggcactgctatggcctcacacaaagacgacaaagacaagttctttcccatgagcggtgtcatgatttttggaaaggagagcgccggagcttcaaacactgcattggacaatgtcatgatcacagacgaagaggaaatcaaagccactaaccccgtggccaccgaaagatttgggactgtggcagtcaatctccagagcagcagcacagaccctgcgaccggagatgtgcatgttatgggagccttacctggaatggtgtggcaagacagagacgtatacctgcagggtcctatttgggccaaaattcctcacacggatggacactttcacccgtctcctctcatgggcggctttggacttaagcacccgcctcctcagatcctcatcaaaaacacgcctgttcctgcgaatcctccggcagagttttcggctacaaagtttgcttcattcatcacccagtattccacaggacaagtgagcgtggagattgaatgggagctgcagaaagaaaacagcaaacgctggaatcccgaagtgcagtatacatctaactatgcaaaatctgccaacgttgatttcactgtggacaacaatggactttatactgagcctcgccccattggcacccgttacctcacccgtcccctgtaa

SEQ ID NO: 3384 - DNA, 2211 bp, Artificial Sequence
  Synthetic polynucleotide
atggctgccgatggttatcttccagattggctcgaggacaacctctctgagggcattcgcgagtggtgggcgctgaaacctggagccccgaaacccaaagccaaccagcaaaagcaggacgacggccggggtctggtgcttcctggctacaagtacctcggacccttcaacggactcgacaagggggagcccgtcaacgcggcggacgcagcggccctcgagcacgacaaggcctacgaccagcagctcaaggcgggtgacaatccgtacctgcggtataaccacgccgacgccgagtttcaggagcgtctgcaagaagatacgtcttttgggggcaacctcgggcgagcagtcttccaggccaaaaagaggcttcttgaacctcttggtctggttgaggaagcggctaagacggctcctggaaagaaacgtccggtagagcagtcgccacaagagccagactcctcctcgggcattggcaagacaggccagcagcccgctaaaaagagactcaactttgggcagactggcgactcagagtcagtgcccgaccctcaaccaatcggagaacctccagcaacccccgctgctgtgggacctactacaatggcttcaggcggtggcgcaccaatggcggacaataacgaaggcgccgatggagtgggtaattcctcgggaaattggcattgcgattccacatggctgggcgacagagtcatcaccaccagcacccgaacctgggccctgcccacctacaacaatcacctctacaagcaaatctccagtgcttcaacgggggccagcaacgacaaccactacttcggctacagcaccccctgggggtattttgatttcaacagattccactgccacttttcaccacgtgactggcagcgactcatcaacaacaactggggattccggcccaagagactcaacttcaagctcttcaacatccaggtcaaggaggtcacgcagaatgaaggcaccaagaccatcgccaataacctcaccagcaccatccaggtgtttacggactcggagtaccagctgccgtacgttctcggctccgcccaccagggctgcctgcctccgttcccggcggacgtgttcatgattccgcagtacggctacctaacgctcaacaatggcagccaggcagtgggacggtcatccttttactgcctggaatatttcccatcgcagatgctgagaacgggcaacaactttaccttcagctacacctttgaggacgttcctttccacagcagctacgctcacagccagagtctggaccgtctcatgaatcctctgattgaccagtacctgtactacttgtctcggactcaaacaacaggaggcacggcaaatacgcagactctgggcttcagccaaggtgggcctaatacaatggccaatcaggcaaagaactggctgccaggaccctgttaccgccaacaacgcgtctcaacgacaaccgggcaaaacaacaatagcaactttgcctggactgctgggaccaaataccatctgaatggaagaaattcattggctaatcctggcatcgctatggcaacacacaaagacgacaaggagcgtttttttcccagtaacgggatcctgatttttggcaaacaaaatgctgccagagacaatgcggattacagcgatgtcatgctcaccagcgaggaagaaatcaaaaccactaaccctgtggctacagaggaatacggtatcgtggcagataacttgcagcagcaaaacacggctcctcaaattggaactgtcaacagccagggggccttacccggtatggtctggcagaaccgggacgtgtacctgcagggtcccatctgggccaagattcctcacacggacggcaacttccacccgtctccgctgatgggcggctttggcctgaaacatcctccgcctcagatcctgatcaagaacacgcctgtacctgcggatcctccgaccaccttcaaccagtcaaagctgaactctttcatcacgcaatacagcaccggacaggtcagcgtggaaattgaatgggagctgcagaaggaaaacagcaagcgctggaaccccgagatccagtacacctccaactactacaaatctacaagtgtggactttgctgttaatacagaaggcgtgtactctgatccccaccccattggcacccgttacctcacccgtcccctgtaa

SEQ ID NO: 3385 - DNA, 2211 bp, Artificial Sequence
  Synthetic polynucleotide
atggctgccgatggttatcttccagattggctcgaggacaacctctctgagggcattcgcgagtggtgggcgctgaaacctggagccccgaagcccaaagccaaccagcaagagcaggacgacggccggggtctggtgcttcctggctacaagtacctcggacccttcaacggactcgacaagggagagcccgtcaacgcggcggatgcagcggccctcgagcacgacaaagcctacgaccagcagctcaaagcgggtgacaatccgtacctgcggtataaccacgccgacgccgagtttcaggagcgtctgcaagaagatacgtcttttgggggcaacctcgggcgagcagtcttccaggccaagaagagggttctcgaaccttttggtctggttgaggaaggtgctaagacggctcctggaaagaaacgtccggtagagcagtcgccacaagagccagactcctcctcgggcattggcaagacaggccagcagcccgctaaaaagagactcaattttggtcagactggcgactcagagtcagttccagaccctcaacctctcggagaacctccagcagcgccctctggtgtgggacctaatacaatggctgcaggcggtggcgcaccaatggcagacaataacgaaggcgccgacggagtgggtagttcctcgggaaattggcattgcgattccacatggctgggcgacagagtcatcaccaccagcacccgaacctgggccctgcccacctacaacaaccacctctacaagcaaatctccagtgcttcaacgggggccagcaacgacaaccactacttcggctacagcaccccctgggggtattttgactttaacagattccactgccacttttcaccacgtgactggcagcgactcatcaacaacaactggggattccggcccaagagactcaacttcaagctcttcaacatccaggtcaaggaggtcacgcagaatgaaggcaccaagaccatcgccaataaccttaccagcacgattcaggtctttacggattcggaataccagctcccgtacgtcctcggctctgcgcaccagggctgcctccctccgttcccggcggacgtgttcatgattccgcagtacggctacctaacgctcaacaatggtagccaggcagtgggacggtcatcctttttctgcctggaatatttcccatcgcagatgctgagaacgggcaacaactttaccttcagctacacctttgaggacgttcctttccacagcagctacgctcacagccagagtctggaccgtctcatgaatcctctgattgaccagtacctgtactacttgtctcggactcaaacaacaggaggcacggcaaatacgcagactctgggcttcagccaaggtgggcctaatacaatggccaatcaggcaaagaactggctgccaggaccctgttaccgccaacaacgcgtctcaacgacaaccgggcaaaacaacaatagcaactttgcctggactgctgggaccaaataccatctgaatggaagaaattcattggctaatcctggcatcgctatggcaacacacaaagacgacaaggagcgtttttttcccagtaacgggatcctgatttttggcaaacaaaatgctgccagagacaatgcggattacagcgatgtcatgctcaccagcgaggaagaaatcaaaaccactaaccctgtggctacagaggaatacggtatcgtggcagataacttgcagcagcaaaacacggctcctcaaattggaactgtcaacagccagggggccttacccggtatggtctggcagaaccgagacgtgtacctgcagggtcccatctgggccaagattcctcacacggacggcaacttccacccgtctccgctgatgggcggctttggcctgaaacatcctccgcctcagatcctgatcaagaacacgcctgtacctgcggatcctccgaccaccttcaaccagtcaaagctgaactctttcatcacgcaatacagcaccggacaggtcagcgtggaaattgaatgggagctgcagaaggaaaacagcaagcgctggaaccccgagatccagtacacctccaactactacaaatctacaagtgtggactttgctgttaatacagaaggcgtgtactctgaaccccaccccattggcacccgttacctcacccgtcccctgtaa

SEQ ID NO: 3386 - DNA, 2211 bp, Artificial Sequence
  Synthetic polynucleotide
atggctgccgatggttatcttccagattggctcgaggacaacctctctgagggcattcgcgagtggtgggacttgaaacctggagccccgaagcccaaagccaaccagcaaaagcaggacgacggccggggtctggtgcttcctggctacaagtacctcggacccttcaacggactcgacaagggggagcccgtcaacgcggcggacgcagcggccctcgagcacgacaaggcctacgaccagcagctcaaagcgggtgacaatccgtacctgcggtataaccacgccgacgccgagtttcaggagcgtctgcaagaagatacgtcttttgggggcaacctcgggcgagcagtcttccaggccaagaagcgggttctcgaacctctcggtctggttgaggaaggcgctaagacggctcctggaaagaaacgtccggtagagcagtcaccacaagagccagactcctcctcgggcatcggcaagacaggccagcagcccgctaaaaagagactcaattttggtcagactggcgactcagagtcagtccccgacccacaacctctcggagaacctccagcaacccccgctgctgtgggacctactacaatggcttcaggcggtggcgcaccaatggcggacaataacgaaggcgccgacggagtgggtaatgcctcaggaaattggcattgcgattccacatggctgggcgacagagtcatcaccaccagcacccgaacatgggccttgcccacctataacaaccacctctacaagcaaatctccagtgcttcaacgggggccagcaacgacaaccactacttcggctacagcaccccctgggggtattttgatttcaacagattccactgccatttctcaccacgtgactggcagcgactcatcaacaacaattggggattccggcccaagagactcaacttcaagctcttcaacatccaagtcaaggaggtcacgacgaatgatggcgtcacgaccatcgctaataaccttaccagcacggttcaagtcttctcggactcggagtaccagttgccgtacgtcctcggctctgcgcaccagggctgcctccctccgttcccggcggacgtgttcatgattccgcagtacggctacctaacgctcaacaatggcagccaggcagtgggacggtcatccttttactgcctggaatatttcccatcgcagatgctgagaacgggcaataactttaccttcagctacaccttcgaggacgtgcctttccacagcagctacgcgcacagccagagcctggaccggctgatgaatcctctcatcgaccagtacctgtattacctgaacagaactcagaatcagtccggaagtgcccaaaacaaggacttgctgtttagccgggggtctccagctggcatgtctgttcagcccaaaaactggctacctggaccctgttaccggcagcagcgcgtttctaaaacaaaaacagacaacaacaacagcaactttacctggacaggtgcttcaaaatataaccttaatgggcgtgaatctataatcaaccctggcactgctatggcctcacacaaagacgacaaagacaagttctttcccatgagcggtgtcatgatttttggaaaggagagcgccggagcttcaaacactgcattggacaatgtcatgatcacagacgaagaggaaatcaaagccactaaccccgtggccaccgaaagatttgggactgtggcagtcaatctccagaacagcagcacagaccctgcgaccggagatgtgcatgttatgggagccttacctggaatggtgtggcaagacagagacgtatacctgcagggtcctatttgggccaaaattcctcacacggatggacactttcacccgtctcctctcatgggcggctttggacttaagcacccgcctcctcagatcctcatcaaaaacacgcctgttcctgcgaatcctccggcagagttttcggctacaaagtttgcttcattcatcacccagtattccacaggacaagtgagcgtggagattgaatgggagctgcagaaagaaaacagcaaacgctggaatcccgaagtgcagtatacatctaactatgcaaaatctgccaacgttgatttcactgtagacaacaatggactttatactgtgcctcgccccattggcacccgttacctcacccgtcccctgtaa

SEQ ID NO: 3387 - DNA, 2211 bp, Artificial Sequence
  Synthetic polynucleotide
atggctgccgatggttatcttccagattggctcgaggacaacctctctgagggcattcgcgagtggtgggcgctgaaacctggagccccgaagcccaaagccaaccagcaaaagcaggacgacggccggggtctggtgcttcctggctacaagtacctcggacccttcaacggactcgacaaaggagagccggtcaacgcggcggacgcggcggccctcgaacacgacaaggcttacgaccagcagctcaaggcgggtgacaacccctacctgcggtataaccacgccgacgccgagttccaggagcggctgcaagaagatacgtcttttgggggcaacctcgggcgagcagtcttccaggccaaaaagaggcttcttgaacctcttggtctggttgaggaaggcgctaagacggctcctggaaagaagaggcctgtagagcagtctcctcaagaaccggactcctcctcgggtattggcaaaacaggtgagcagcccgctaaaaagagactcaattttggtcagactggcgactcagagtcagtccccgacccacaacctctcggagaacctccagcaacccccgctgctgtgggacctactacaatggcttcaggcggtggcgcaccaatggcagacaataacgaaggcgccgacggagtgggtagtgcctcaggaaattggcattgcgattccacatggctgggcgacagagtcatcaccaccagcacccgaacctgggccctgcccacctataacaaccatctctacaagcaaatctccagtgcttcaacgggggccagcaacgacaaccactacttcggctacagcaccccctgggggtattttgacttcaacagattccactgccacttctcaccacgtgactggcagcgactcatcaacaacaactggggattccggcctaagcgactcaacttcaagctcttcaacattcaggtcaaagaggttacggacaacaatggagtcaagaccatcgccaataacctcaccagcaccatccaggtgttcacggactcagagtatcagctgccgtacgtgctcgggtcggctcaccagggctgcctccctccgttcccagcggacgtgttcatgattcctcagtacgggtatctgacactcaacaacggcagtcaggcagtgggacggtcatccttctactgcctggaatattttccatcgcagatgctgagaaccggcaacaactttccgttcagttacaccttcgaggacgtgcctttccacagcagctacgcgcacagccagagcctggaccggctgatgaatcctctgattgaccagtacctgtactacttgtctcggactcaaacaacaggaggcacggcaaatacgcagactctgggcttcagccaaggtgggcctaatacaatggccaatcaggcaaagaactggctgccaggaccctgttaccgccaacaacgcgtctcaacgacaaccgggcaaaacaacaatagcaactttgcctggactgctgggaccaaataccatctgaatggaagaaattcattggctaatcctggcatcgctatggcaacacacaaagacgacaaggagcgtttttttcccagtaacgggatcctgatttttggcaaacaaaatgctgccagagacaatgcggattacagcgatgtcatgctcaccagcgaggaagaaatcaaaaccactaaccctgtggctacagaggaatacggtatcgtggcagataacttgcagcagcaaaacacggctcctcaaattggaactgtcaacagccagggggccttacccggtatggtctggcagaaccgggacgtgtacctgcagggtcccatctgggccaagattcctcacacggacggcaacttccacccgtctccgctgatgggcggctttggcctgaaacatcctccgcctcagatcctgatcaagaacacgcctgtacctgcggatcctccgaccaccttcaaccagtcaaagctgaactctttcatcacgcaatacagcaccggacaggtcagcgtggaaattgaatgggagctgcagaaggaaaacagcaagcgctggaaccccgagatccagtacacctccaactactacaaatctacaagtgtggactttgctgttaatacagaaggcgtgtactctgaaccccaccccattggcacccgttacctcacccgtcccctgtaa

SEQ ID NO: 3388 - DNA, 2211 bp, Artificial Sequence
  Synthetic polynucleotide
atggctgccgatggttatcttccagattggctcgaggacaacctctctgagggcattcgcgagtggtgggcgctgaaacctggagccccgaagcccaaagccaaccagcaaaagcaggacgacggccggggtctggtgcttcctggctacaagtacctcggacccttcaacggactcgacaagggggagcccgtcaacgcggcggacgcagcggccctcgagcacgacaaggcctacgaccagcagctcaaagcgggtgacaatccgtacctgcggtataaccacgccgacgccgagtttcaggagcgtctgcaagaagatacgtcttttgggggcaacctcgggcgagcagtcttccaggccaagaagcgggttctcgaacctctcggtctggttgaggaaggcgctaagacggctcctggaaagaaacgtccggtagaacagtcgccacaagagccagactcctcctcgggcatcggcaagacaggccagcagcccgctaaaaagagactcaattttggtcagactggcgactcagagtcagtccccgatccacaacctctcggagaacctccagcaacccccgctgctgtgggacctactacaatggcttcaggcggtggcgcaccaatggcagacaataacgaaggcgccgacggagtgggtagttcctcgggaaattggcattgcgattcccaatggctgggggacagagtcatcaccaccagcacccgaacctgggccctgcccacctacaacaaccacctctacaagcaaatctccagtgcttcaacgggggccagcaacgacaaccactacttcggctacagcaccccctgggggtattttgatttcaacagattccactgccatttctcaccacgtgactggcagcgactcatcaacaacaactggggattccggcctaagcgactcaacttcaagctcttcaacattcaggtcaaagaggttacggacaacaatggagtcaagaccatcgccaataaccttaccagcacggtccaggtcttcacggactcggagtaccagttgccgtacgtcctcggctctgcgcaccaggactgcctccctccgttcccggcggacgtgttcatgattccgcagtacggctacctaacgctcaacaatggcagccaggcagtgggacggtcatccttttactgcctggaatatttcccatcgcagatgctgagaacgggcaacaactttaccttcagctacacctttgaggacgttcctttccacagcagctacgctcacagccagagtctggaccgtctcatgaatcctctgattgaccagtacctgtactacttgtctcggactcaaacaacaggaggcacggcaaatacgcagactctgggcttcagccaaggtgggcctaatacaatggccaatcaggcaaagaactggctgccaggaccctgttaccgccaacaacgcgtctcaacgacaaccggacaaaacaacaatagcaactttgcctggactgctgggaccaaataccatctgaatggaagaaattcattggctaatcctggcatcgctatggcaacacacaaagacgacaaggagcgtttttttcccagtaacgggatcctgatttttggcaaacaaaatgctgccagagacaatgcggattacagcgatgtcatgctcaccagcgaggaagaaatcaaaaccactaaccctgtggctacagaggaatacggtatcgtggcagataacttgcagcagcaaaacacggctcctcaaattggaactgtcaacagccagggggccttacccggtatggtctggcagaaccgggacgtgtacctgcagggtcccatctgggccaagattcctcacacggacggcaacttccacccgtctccgctgatgggcggctttggcctgaaacatcctccgcctcagatcctgatcaagaacacgcctgtacctgcggatcctccgaccaccttcaaccagtcaaagctgaactctttcatcacgcaatacagcaccggacaggtcagcgtggaaattgaatgggagctgcagaaggaaaacagcaagcgctggaaccccgagatccagtacacctccaactactacaaatctacaagtgtggactttgctgttaatacagaaggcgtgtactctgaaccccaccccattggcacccgttacctcacccgtcccctgtaa

SEQ ID NO: 3389 - DNA, 2211 bp, Artificial Sequence
  Synthetic polynucleotide
atggctgccgatggttatcttccagattggctcgaggacaacctctctgagggcattcgcgagtggtgggacttgaaacctggagccccgaagcccaaagccaaccagcaaaagcaggacgacggccggggtctggtgcttcctggctacaagtacctcggacccttcaacggactcgacaagggggagcccgtcaacgcggcggacgcagcggccctcgagcacgacaaggcctacgaccagcagctcaaagcgggtgacaatccgtacctgcggtataaccacgccgacgccgagtttcaggagcgtctgcaagaagatacgtcttttgggggcaacctcgggcgagcagtcttccaggccaagaagcgggttctcgaacctctcggtctggttgaggaaggcgctaagacggctcctggaaagaaacgtccggtagagcagtcaccacaagagccagactcctcctcgggcatcggcaagacaggccagcagcccgctaaaaagagactcaattttggtcagactggcgactcagagtcagtccccgacccacaacctctcggagaacctccagcaacccccgctgctgtgggacctactacaatggcttcaggcggtggcgcaccaatggcagacaataacgaaggtgccgacggagtgggtaatgcctcaggaaattggcattgcgattccacatggctgggcgactgagtcatcaccaccagcacccgcacctgggccttgcccacctacaataaccacctctacaagcaaatctccagtgcttcaacgggggccagcaacgacaaccactacttcggctacagcaccccctgggggtattttgatttcaacagattccactgccacttttcaccacgtgactggcagcgactcatcaacaacaattggggattccggcccaagagactcaacttcaaactcttcaacatccaagtcaaggaggtcacgcagaatgaaggcaccaagaccatcgccaataacctcaccagcaccatccaggtgtttacggactcggagtaccagctgccgtacgttctcggctctgcccaccagggctgcctgcctccgttcccggcggacgtgttcatgattccccagtacggctacctaacgctcaacaatggcagccaggcagtgggacggtcatccttttactgcctggaatactttccttcgcagatgctgagaaccggcaacaacttccagtttacttacaccttcgaggacgtgcctttccacagcagctacgcccacagccagagcttggaccggctgatgaatcctctgattgaccagtacctgtactacttgtctcggactcaaacaacaggaggcacggcaaatacgcagactctgggcttcagccaaggtgggcctaatacaatggccaatcaggcaaagaactggctgccaggaccctgttaccgccaacaacgcgtctcaacgacaaccgggcaaaacaacaatagcaactttgcctggactgctgggaccaaataccatctgaatggaagaaattcattggctaatcctggcatcgctatggcaacacacaaagacgacaaggagcgtttttttcccagtaacgggatcctgatttttggcaaacaaaatgctgccagagacaatgcggattacagcgatgtcatactcaccagcgaggaagaaatcaaaaccactaaccctgtggctacagaggaatacggtatcgtggcagataacttgcagcagcaaaacacggctcctcaaattggaactgtcaacagccagggggccttacccggtatggtctggcagaaccgggacgtgtacctgcagggtcccatctgggccaagattcctcacacggacggcaacttccacccgtctccgctgatgggcggctttggcctgaaacatcctccgcctcagatcctgatcaagaacacgcctgtacctgcggatcctccgaccaccttcaaccagtcaaagctgaactctttcatcacgcaatacagcaccggacaggtcagcgtggaaattgaatgggagctgcagaaggaaaacagcaagcgctggaaccccgagatccagtacacctccaactactacaaatctacaagtgtggactttgctgttaatacagaaggcgtgtactctgaaccccaccccattggcacccgttacctcacccgtcccctgtaa

SEQ ID NO: 3390 - DNA, 2211 bp, Artificial Sequence
  Synthetic polynucleotide
atggctgccgatggttatcttccagattggctcgaggacactctctctgaaggaataagacagtggtggaagctcaaacctggcccaccaccaccaaagcccgcagagcggcataaggacgacagcaggggtcttgtgcttcctgggtacaagtacctcggacccttcaacggactcgacaagggagagccggtcaacgaggcagacgccgcggccctcgagcacgacaaagcctacgaccggcagctcgacagcggagacaacccgtacctcaagtacaaccacgccgacgcggagtttcaggagcgccttaaagaagatacgtcttttgggggcaacctcgggcgagcagtcttccaggccaagaagagggttctcgaaccttttggtctggttgaggaaggtgctaagacggctcctggaaagaaacgtccggtagagcagtcgccacaagagccagactcctcctcgggcattggcaagacaggccagcagcccgctaaaaagagactcaattttggtcagactggcgactcagagtcagtccccgacccacaacctctcggagaacctccagcaacccccgctgctgtgggacctactacaatggcttcaggcggtggcgcaccaatggcagacaataacgaaggcgccgacggagtgggtaatgcctcaggaaattggcattgcgattccacatggctgggcgacagagtcatcaccaccagcacccgaacatgggccttgcccacctataacaaccacctctacaagcaaatctccagtacttcaacgggggccagtaacgacaaccactacttcggctacagcaccccctgggggtattttgacttcaacagattccactgccacttctcaccacgtgactggcagcgactcatcaacaacaactggggattccggcctaagcgactcaacttcaagctcttcaacattcaggtcaaagaggttacggacaacaatggagtcaagaccatcgccaataaccttaccagcacggtccaggtcttcacggactcggagtaccagttgccgtacgtcctcggctctgcgcaccagggctgcctgcctccgttcccggcggacgtgttcatgattccgcagtacggctacctaacgctcaacaatggcagccaggcagtgggacggtcatccttttactgcctggaatatttcccatcgcagatgctgagaacgggcaacaactttaccttcagctacacttttgaggacgttcctttccacagcagctacgctcacagccagagtctggaccgtctcatgaatcctctgattgaccagtacctgtactacttgtctcggactcaaacaacaggaggcacggcaaatacgcagactctgggcttcagccaaggtgggcctaatacaatggccaatcaggcaaagaactggctgccaggaccctgttaccgccaacaacgcgtctcaacgacaaccggacaaaacaacaatagcaactttgcctggactgctgggaccaaataccatctgaatggaagaaattcattggctaatcctggcatcgctatggcaacacacaaagacgacaaggagcgtttttttcccagtaacgggatcctgatttttggcaaacaaaatgctgccagagacaatgcggattacagcgatgtcatgctcaccagcgaggaagaaatcaaaaccactaaccctgtggctacagaggaatacggtatcgtggcagataacttgcagcagcaaaacacggctcctcaaattggaactgtcaacagccagggggccttacccggtatggtctggcagaaccgggacgtgtacctgcagggtcccatctgggccaagattcctcacacggacggcaacttccacccgtctccgctgatgggcggctttggcctgaaacatcctccgcctcagatcctgatcaagaacacgcctgtacctgcggatcctccgaccaccttcaaccagtcaaagctgaactctttcatcacgcaatacagcaccggacaggtcagcgtggaaattgaatgggagctgcagaaggaaaacagcaagcgctggaaccccgagatccagtacacctccaactactacaaatctacaagtgtggactttgctgttaatacagaaggcgtgtactctgaaccccaccccattggcacccgttacctcacccgtcccctgtaa

SEQ ID NO: 3391 - DNA, 2208 bp, Artificial Sequence
  Synthetic polynucleotide
atggctgccgatggttatcttccagattggctcgaggacaacctctctgagggcattcgcgagtggtgggacttgaaacctggagccccgaagcccaaagccaaccagcaaaagcaggacgacggccggggtctggtgcttcctggctacaagtacctcggacccttcaacggactcgacaagggggagcccgtcaacgcggcggatgcagcggccctcgagcacgacaaggcctacgaccggcagctcgacagcggagacaacccgtacctgcggtataaccacgccgacgcggagtttcaggagcgccttaaagaagatacgtcttttgggggcaacctcgggcgagcagtcttccaggccaagaagagggttctcgaaccttttggtctggttgaggaaggtgctaagacggctcctggaaagaaacgtccggtagagcagtcgccacaagagccagactcctcctcgggcattggcaagacaggccagcagcccgctaaaaagagactcaattttggtcagactggcgactcagagtcagtccccgacccacaacctctcggagaacctccagcaacccccgctgctgtgggacctactacaatggcttcaggcggtggcgcaccaatggcagacaataacgaaggcgccgacggagtgggtaatgcctcaggaaattggcattgcgattccacatggctgggcgacagagtcatcaccaccagcacccgcacctgggccttgcccacctacaataaccacctctacaagcaaatctccagtgcttcaacgggggccagcaacgacaaccactacttcggctacagcaccccctgggggtattttgactttaacagattccactgccacttttcaccacgtgactggcaaagactcatcaacaacaactggggattccggcccaagagactcaacttcaagctcttcaacatccaggtcaaggaggtcacgcagaatgaaggcaccaagaccatcgccaataaccttaccagcacgattcaggtctttacggactcggaataccagctcccgtacgtcctcggctctgcgcaccagggctgcctccctccgttcccggcggacgtgttcatgattccgcagtacggctacctaacactcaacaacggtagtcaggccgtgggacgctcctccttctactgcctggaatactttccttcgcagatgctgagaaccggcaacaacttccagtttacttacaccttcgaggacgtgcctttccacagcagctacgcccacagccagagcttggaccggctgatgaatcctctgattgaccagtacctgtactacttgtctcggactcaaacaacaggaggcacggcaaatacgcagactctgggcttcagccaaggtgggcctaatacaatggccaatcaggcaaagaactggctgccaggaccctgttaccgccaacaacgcgtctcaacgacaaccgggcaaaacaacaatagcaactttgcctggactgctgggaccaaataccatctgaatggaagaaattcactggctaatcctggcatcgctatggcaacacacaaagacgacaggagcgtttttttccagtaccgggatcctgattttggcaaacaaaatgctgccagagacaatgcggattacagcgatgtcatgctcaccagcgaggaagaaatcaaaaccactaaccctgtggctacagaggaatacggtatcgtggcagataacttgcagcagcaaaacacggctcctcaaattggaactgtcaacagccagggggccttacccggtatggtctggcagaaccgggacgtgtacctgcagggtcccatctgggccaagattcctcacacggacggcaacttccacccgtctccgctgatgggcggctttggcctgaaacatcctccgcctcagatcctgatcaagaacacgcctgtacctgcggatcctccgaccaccttcaaccagtcaaagctgaactctttcatcacgcaatacagcaccggacaggtcagcgtggaaattgaatgggagctgcagaaggaaaacagcaagcgctggaaccccgagatccagtacacctccaactactacaaatctacaagtgtggactttgctgttaatacagaaggcgtgtactctgaaccccaccccattggcacccgttacctcacccgtcccctgtaa

SEQ ID NO: 3392 - DNA, 2211 bp, Artificial Sequence
  Synthetic polynucleotide
atggctgccgatggttatcttccagattggctcgaggacaacctctctgagggcattcgcgagtggtgggcgctgaaacctggagccccgaagcccaaagccaaccagcaaaagcaggacgacggccggggtctggtgcttcctggctacaagtacctcggacccttcaacggactcgacaagggggagcccgtcaacgcggcggatgcagcagccctcgaacacgacaaagcttacgaccagcagctcaaggccggtgacaacccctacctcaagtataaccacgccgacgccgagtttcaggagcgtcttcaaggagatacgtcttttgggggcaacctcggacgagcagtcttccaggccaagaagcgggttctcgaacctcttggtctggttgaggaagcggctaagacggctcctggaaagaagaggcctgtagagcagtctcctcaggaaccggactcctccgcgggtattggcaaatcgggtgcacagcccgctaaaaagagactcaatttcggtcagactggcgacacagagtcagtcccagaccctcaacctctcggagaacctccagcagcgccctctggtgtgggacctaatacaatggctgcaggcggtggcgcaccaatggcagacaataacgaaggtgccgatggagtgggtagttcctcgggaaattggcattgcgattcccaatggctgggggacagagtcatcaccaccagcacccgaacctgggccctgcccacctacaacaaccacctctacaagcaaatctccagtgcttcaacgggggccagcaacgacaaccactacttcggctacagcaccccttgggggtattttgacttcaacagattccactgccacttttcaccacgtgactggcagcgactcatcaacaacaactggggattccggcctaagcgactcaacttcaagctcttcaacattcaggtcaaagaggttacggacaacaatggagtcaagaccatcgccaataaccttaccagcacggtccaggtcttcacggactcagactatcagctcccgtacgtgctcgggtcggctcacgagggctgcctccctccgttcccggcggacgtgttcatgattccgcagtacggctacctaacgctcaacaatggcagccaggcagtgggacggtcatccttttactgcctggaatactttccttcgcagatgctgagaaccggcaacaacttccagtttacttacaccttcgaggacgtgcctttccacagcagctacgctcacagccagagtctggaccgtctcatgaatcctctgattgaccagtacctgtactacttgtctcggactcaaacaacaggaggcacggcaaatacgcagactctgggcttcagccaaggtgggcctaatacaatggccaatcaggcaaagaactggctgccaggaccctgttaccgccaacaacgcgtctcaacgacaaccgggcaaaacaacaatagcaactttgcctggactgctgggaccaaataccatctgaatggaagaaattcattggctaatcctggcatcgctatggcaacacacaaagacgacaaggagcgtttttttcccagtaacgggatcctgatttttggcaaacaaaatgctgccagagacaatgcggattacagcgatgtcatgctcaccagcgaggaagaaatcaaaaccactaaccctgtggctacagaggaatacggtatcgtagcagataacttgcagcagcaaaacacggctcctcaaattggaactgtcaacagccagggggccttacccggtatggtctggcagaaccgggacgtgtacctgcagggtcccatctgggccaagattcctcacacggacggcaacttccacccgtctccgctgatgggcggctttggcctgaaacatcctccgcctcagatcctgatcaagaacacgcctgtacctgcggatcctccgaccaccttcaaccagtcaaagctgaactctttcatcacgcaatacagcaccggacaggtcagcgtggaaattgaatgggagctgcagaaggaaaacagcaagcgctggaaccccgagatccagtacacctccaactactacaaatctacaagtgtggactttgctgttaatacagaaggcgtgtactctgaaccccaccccattggcacccgttacctcacccgtcccctgtaa

SEQ ID NO: 3393 - DNA, 2211 bp, Artificial Sequence
  Synthetic polynucleotide
atggctgccgatggttatcttccagattggctcgaggacactctctctgaaggaataagacagtggtggaagctcaaacctggcccaccaccaccaaagcccgcagagcggcataaggacgacagcaggggtcttgtgcttcctgggtacaagtacctcggacccttcaacggactcgacaagggagagccggtcaacgaggcagacgccgcggccctcgagcacgacaaagcctacgaccggcagctcgacagcggagacaacccgtacctcaagtacaaccacgccgacgcggagtttcaggagcgccttaaagaagatacgtcttttgggggcaacctcgggcgagcagtcttccaggccaagaagagggttctcgaaccttttggtctggttgaggaagcggctaagacggctcctggaaagaaacgtccggtagagcagtcgccacaagagccagactcctcctcgggcattggcaagacaggccagcagcccgctaaaaagagactcaattttggtcagactggcgactcagagtcagtccccgacccacaacctctcggagaacctccagcaacccccgctgctgtgggacctactacaatggcttcaggcggtggcgcaccaatggcagacaataacgaaggcgccgacggagtgggtaatgcctcaggaaattggcattgcgattccacatggctgggcgacagagtcatcaccaccagcacccgaacatgggccttgcccacctataacaaccacctctacaagcaaatctccagtgcttcaacgggggccagcaacgacaaccactacttcggctacagcaccccctgggggtattttgacttcaacagattccactgccacttctcaccacgtgactggcagcgactcatcaacaacaactggggattccggcctaagcgactcaacttcaagctcttcaacattcaggtcaaagaggttacggacaacaatggagtcaagaccatcgccaataaccttaccagcacggtccaggtcttcacggactcagactatcagctcccgtacgtgctcgggtcggctcacgagggctgcctcccgccgttcccagcggacgttttcatgattcctcagtacggctacctaacactcaacaacggtagtcaggccgtgggacgctcctccttctactgcctggaatactttccttcgcagatgctgagaacgggcaacaactttaccttcagctacacctttgaggacgttcctttccacagcagctacgctcacagccagagtctggaccgtctcatgaatcctctgattgaccagtacctgtactacttgtctcggactcaaacaacaggaggcacggcaaatacgcagactctgggcttcagccaaggtgggcctaatacaatggccaatcaggcaaagaactggctgccaggaccctgttaccgccaacaacgcgtctcaacgacaaccgggcaaaacaacaatagcaactttgcctggactgctgggacaaaataccatctgaatggaagaaattcattggctaatcctggcatcgctatggcaacacacaaagacgacaaggagcgtttttttcccagtaacgggattctgatttttggcaaacaaaatgctgccagagacaatgcggattacagcgatgtcatgctcaccagcgaggaagaaatcaaaaccactaaccctgtggctacagaggaatacggtatcgtggcagataacttgcagcagcaaaacacggctcctcaaattggaactgtcaacagccagggggccttacccggtatggtctggcagaaccgggacgtgtacctgcagggtcccatctgggccaagattcctcacacggacggcaacttccacccgtctccgctgatgggcggctttggacttaagcacccgcctcctcagatcctcatcaaaaacacgcctgttcctgcggatcctccgaccaccttcaaccagtcaaagctgaactctttcatcacgcaatacagcaccggacaggtcagcgtggaaattgaatgggagctgcagaaggaaaacagcaagcgctggaaccccgagatccagtacacctccaactactacaaatctacaagtgtggactttgctgttaatacagaaggcgtgtactctgaaccccaccccattggcacccgttacctcacccgtcccctgtaa

SEQ ID NO: 3394 - DNA, 2211 bp, Artificial Sequence
  Synthetic polynucleotide
atggctgccgatggttatcttccagattggctcgaggacaacctctctgagggcattcgcgagtggtgggcgctgaaacctggagccccgaagcccaaagccaaccagcaaaagcaggacgacggccggggtctggtgcttcctggctacaagtacctcggacccttcaacggactcgacaaaggagagccggtcaacgcggcggacgcagcggccctcgagcacgacaaggcctacgaccagcagctcaaagcgggtgacaatccgtacctgcggtataaccacgccgacgccgagtttcaggagcgtctgcaagaagatacgtcttttgggggcaacctcgggcgagcagtcttccaggccaagaagcgggttctcgaacctctcggtctggttgaggaaggcgctaagacggctcctggaaagaaacgtccggtagagcagtcgccacaagagccagactcctcctcgggcatcggcaagacaggccagcagcccgctaaaaagagactcaattttggtcagactggcgactcagagtcagtccccgacccacaacctctcggagaacctccagcaacccccgctgctgtgggacctactacaatggcttcaggcggtggcgcaccaatggcagacaataacgaaggcgccgacggagtgggtagttcctcgggaaattggcattgcgattccacatggctgggcgacagagtcatcaccaccagcacccgcacctgggccttgcccacctacaataaccacctctacaagcaaatctccagtgcttcaacgggggccagcaacgacaaccactacttcggctacagcaccccctgggggtattttgacttcaacagattccactgccacttctcaccacgtgactggcagcgactcatcaacaacaactggggattccggcctaagcgactcaacttcaagctcttcaacattcaggtcaaagaggttacggacaacaatggagtcaagaccatcgccaataaccttaccagcacggtccaggtcttcacggactcggagtaccagttgccgtacgtcctcggctctgcgcaccagggctgcctccctccgttcccggcggacgtgttcatgattccgcagtacggctacctaacgctcaacaatggcagccaggcagtgggacggtcatccttttactgcctggaatatttcccatcgcagatgctgagaacgggcaacaactttaccttcagctacacctttgaggacgttcctttccacagcagctacgctcacagccagagtctggaccgtctcatgaatcctctgattgaccagtacctgtactacttgtctcggactcaaacaacaggaggcacggcaaatacgcagactctgggcttcagccaaggtgggcctaatacaatggccaatcaggcaaagaactggctgccaggaccctgttaccgccaacaacgcgtctcaacgacaaccgggcaaaacaacaatagcaactttgcctggactgctgggaccaaataccatctgaatggaagaaattcattggctaatcctggcatcgctatggcaacacacaaagacgacaaggagcgtttttttcccagtaacgggatcctgatttttggcaaacaaaatgctgccagagacaatgcggattacagcgatgtcatgctcaccagcgaggaagaaatcaaaaccactaaccctgtggctacagaggaatacggtatcgtggcagataacttgcagcagcaaaacacggctcctcaaattggaactgtcaacagccagggggccttacccggtatggtctggcagaaccgggatgtgtacctgcagggtcccatctgggccaagattcctcacacggacggcaacttccacccgtctccgctgatgggcggctttggcctgaaacatcctccgcctcagatcctgatcaagaacacgcctgtacctgcggatcctccgaccaccttcaaccagtcaaagctgaactctttcatcacgcaatacagcaccggacaggtcagcgtggaaattgaatgggagctgcagaaggaaaacagcaagcgctggaaccccgagatccagtacacctccaactactacaaatctacaagtgtggactttgctgttaatacagaaggcgtgtactctgaaccccaccccattggcacccgttacctcacccgtcccctgtaa

SEQ ID NO: 3395 - DNA, 2214 bp, Artificial Sequence
  Synthetic polynucleotide
atggctgccgatggttatcttccagattggctcgaggacaaccttagtgaaggaattcgcgagtggtgggcgctgaaacctggagccccgaagcccaaagccaaccagcaaaagcaggacgacggccggggtctggtgcttcctggctacaagtacctcggacccttcaacggactcgacaagggggagcccgtcaacgcggcggacgcagcggccctcgagcacgacaaggcctacgaccagcagctcaaagcgggtgacaatccgtacctgcggtataaccacgccgacgccgagtttcaggagcgtctgcaagaagatacgtcttttgggggcaacctcgggcgagcagtcttccaggccaagaagcgggttctcgaacctctcggtctggttgaggaaggcgctaagacggctcctggaaagaaacgtccggtagagcagtcgccacaagagccagactcctcctcgggcatcggcaagacaggccagcagcccgctaaaaagagactcaatttcggtcagactggcgacacagagtcagtcccagaccctcaaccaatcggagaacctcccgcagccccctcaggtgtgggatctcttacaatggcttcaggtggtggcgcaccagtggcagacaataacgaaggtgccgatggagtgggtagttcctcgggaaattggcattgcgattcccaatggctgggggacagagtcatcaccaccagcaccagaacctgggccttgcccacctacaataaccacctctacaagcaaatctccaacagcacatctggaggatcttcaaatgacaacgcctacttcggctacagcaccccctgggggtattttgactttaacagattccactgccacttttcaccacgtgactggcagcgactcatcaacaacaactggggattccgacccaagagactcaacttcaagctcttcaacatccaggtcaaggaggtcacgcagaacgaaggcaccaagaccatcgccaataacctcaccagcaccatccaggtgtttacggactcggagtaccagctgccgtacgttctcggctccgcccaccagggctgcctgcctccgttcccggcggacgtgttcatgattccccagtacggctacctaacgctcaacaacggtagtcaggccgtgggacgctcctccttctactgcctggaatactttccttcgcagatgctgagaaccggcaacaacttccagtttacttacaccttcgaggacgtgcctttccacagcagctacgcgcacagccagagcttggaccggctgatgaatcctctgattgaccagtacctgtactacttgtctcggactcaaacaacaggaggcacggcaaatacgcagactctgggcttcagccaaggtgggcctaatacaatggccaatcaggcaaagaactggctgccaggaccctgttaccgccaacaacgcgtctcaacgacaaccgggcaaaacaacaatagcaactttgcctggactgctgggaccaaataccatctgaatggaagaaattcattggctaatcctggcatcgctatggcaacacacaaagacgacaaggagcgtttttttcccagtaacgggatcctgatttttggcaaacaaaatgctgccagagacaatgcggattacagcgatgtcatgctcaccagcgaggaagaaatcaaaaccactaaccctgtggctacagaggaatacggtatcgtggcagataacttgcagcagcaaaacacggctcctcaaattggaactgtcaacagccagggggccttacccggtatggtctggcagaaccgggacgtgtacctgcagggtcccatctgggccaagattcctcacacggacggcaacttccacccgtctccgctgatgggcggctttggcctgaaacatcctccgcctcagatcctgatcaagaacacgcctgtacctgcggatcctccgaccaccttcaaccagtcaaagctgaactctttcatcacgcaatacagcaccggacaggtcagcgtggaaattgaatgggagctgcagaaggaaaacagcaagcgctggaaccccgagatccagtacacctccaactactacaaatctacaagtgtggactttgctgttaatacagaaggcgtgtactctgaaccccaccccattggcactcgttacctcacccgtcccctgtaa

SEQ ID NO: 3396 - DNA, 2211 bp, Artificial Sequence
  Synthetic polynucleotide
atggctgccgatggttatcttccagattggctcgaggacaacctctctgagggcattcgcgagtggtgggcgctgaaacctggagccccgaagcccaaagccaaccagcaaaagcaggacgacggccggggtctggtgcttcctggctacaagtacctcggacccttcaacggactcgacaagggggagcccgtcaacgcggcggatgcagcagccctcgaacacgacaaagcttacgaccagcagctcaaggccggtgacaacccctacctcaagtataaccacgccgacgccgagtttcaggagcgtcttcaaggagatacgtcttttgggggcaacctcggacgagcagtcttccaggccaagaagcgggttctcgaacctcttggtctggttgaggaagcggctaagacggctcctggaaagaagaggcctgtagagcagtctcctcaggaaccggactcctccgcgggtattggcaaatcgggtgcacagcccgctaaaaagagactcaatttcggtcagactggcgacacagagtcagtcccagaccctcaacctctcggagaacctccagcagcgccctctggtgtgggacctaatacaatggctgcaggcggtggcgcaccaatggcagacaataacgaaggtgccgatggagtgggtagttcctcgggaaattggcattgcgattcccaatggctgggggacagagtcatcaccaccagcacccgaacctgggccctgcccacctacaacaaccacctctacaagcaaatctccagtgcttcaacgggggccagcaacgacaaccactacttcggctacagcaccccttgggggtattttgacttcaacagattccactgccacttctcaccacgtgactggcagcgactcatcaacaacaactggggattccggcctaagcgactcaacttcaagctcttcaacattcaggtcaaagaggttacggacaacaatggagtcaagaccatcgccaataaccttaccagcacggtccaggtcttcacggactcggagtaccagttgccgtacgtcctcggctctgcgcaccagggctgcctccctccgttcccggcggacgtgttcatgattccgcagtacggctacctaacgctcaacaatggcagccaggcagtgggacggtcatccttttactgcctggaatatttcccatcgcagatgctgagaacgggcaacaactttaccttcagctacacctttgaggacgttcctttccacagcagctacgctcacagccagagtctggaccgtctcatgaatcctctgattgaccagtacctgtactacttgtctcggactcaaacaacaggaggcacggcaaatacgcagactctgggcttcagccaaggtgggcctaatacaatggccaatcaggcaaagaactggctgccaggaccctgttaccgccaacaacgcgtctcaacgacaaccgggcaaaacaacaatagcaactttgcctggactgctgggaccaaataccatctgaatggaagaaattcattggctaatcctggcatcgctatggcaacacacaaagacgacaaggagcgtttttttcccagtaacgggatcctgatttttgacaaacaaaatgctgccagagacaatgcggattacagcgatgtcatgctcaccagcgaggaagaaatcaaaaccactaaccctgtggctacagaggaatacggtatcgtggcagataacttgcagcagcaaaacacggctcctcaaattggaactgtcaacagccagggggccttacccggtatggtctggcagaaccgggatgtgtacctgcagggtcccatctgggccaagattcctcacacggacggcaacttccacccgtctccgctgatgggcggctttggcctgaaacatcctccgcctcagatcctgatcaagaacacgcctgtacctgcggatcctccgaccaccttcaaccagtcaaagctgaactctttcatcacgcaatacagcaccggacaggtcagcgtggaaattgaatgggagctgcagaaggaaaacagcaagcgctggaaccccgagatccagtacacctccaactactacaaatctacaagtgtggactttgctgttaatacagaaggcgtgtactctgaaccccaccccattggcacccgttacctcacccgtcccctgtaa

SEQ ID NO: 3397 - DNA, 2211 bp, Artificial Sequence
  Synthetic polynucleotide
atggctgccgatggttatcttccagattggctcgaggacactctctctgaaggaataagacagtggtggaagctcaaacctggcccaccaccaccaaagcccgcagagcggcataaggacgacagcaggggtcttgtgcttcctgggtacaagtacctcggacccttcaacggactcgacaagggagagccggtcaacgaggcagacgccgcggccctcgagcacgacaaagcctacgaccggcagctcgacagcggagacaacccgtacctcaagtacaaccacgccgacgcggagtttcaggagcgccttaaagaagatacgtcttttgggggcaacctcggacgagcagtcttccaggcgaaaaagagggttcttgaacctctgggcctggttgaggaacctgttaagacggctccgggaaaaaagaggccggtagagcactctcctgtggagccagactcctcctcgggaaccggaaaggcgggccagcagcctgcaagaaaaagattgaattttggtcagactggcgactcagagtcagtccccgacccacaacctctcggagaacctccagcaacccccgctgctgtgggacctaatacgatggctacaggcagtggcgcaccaatggcagacaataacgagggcgccgacggagtgggtaattcctcgggaaattggcattgcgattccacatggatgggcgacagagtcatcaccaccagcaccagaacctgggccctgcccacttacaacaaccatctctacaagcaaatctccagtgcttcaacgggggccagcaacgacaaccactacttcggctacagcaccccctgggggtattttgacttcaacagattccactgccacttctcaccacgtgactggcagcgactcatcaacaacaactggggattccggcctaagcgactcaacttcaagctcttcaacattcaggtcaaagaggttacggacaacaatggagtcaagaccatcgccaataaccttaccagcaccatccaggtctttacggactcggaataccagctgccgtacgttctcggctctgcccaccagggctgcctgcctccgttcccggcggacgtgttcatgattccccagtacggctacctaacactcaacaacggtagtcaggccgtgggacgctcctccttctactgcctggaatatttcccatcgcagatgctgagaacgggcaacaactttaccttcagctacacctttgaggacgttcctttccacagcagctacgctcacagccagagtctggaccgtctcatgaatcctctgattgaccagtacctgtactacttgtctcggactcaaacaacaggaggcaaggcaaatacgcagactctgggcttcagccaaggtgggcctaatacaatggccaatcaggcaaagaactggctgccaggaccctgttaccgccaacaacgcgtctcaacgacaaccgggcaaaacaacaatagcaactttgcctggactgctgggaccaaataccatctgaatggaagaaattcattggctaatcctggcatcgctatggcaacacacaaagacgacaaggagcgtttttttcccagtaacgggatcctgatttttggcaaacaaaatgctgccagagacaatgcggattacagcgatgtcatgctcaccagcgaggaagaaatcaaaaccactaaccctgtggctacagaggaatacggtatcgtggcagataacttgcagcagcaaaacacggctcctcaaattggaactgtcaacagccagggggccttacccggtatggtctggcagaaccgggacgtgtacctgcagggtcccatctgggccaagattcctcacacggacggcaacttccacccgtctccgctgatgggcggctttggcctgaaacatcctccgcctcagatcctgatcaagaacacgcctgtacctgcggatcctccgaccaccttcaaccagtcaaagctgaactctttcatcacgcaatacagcaccggacaggtcagcgtggaaattgaatgggagctgcagaaggaaaacagcaagcgctggaaccccgagatccagtacacctccaactactacaaatctacaagtgtggactttgctgttaatacagaaggcgtgtactctgaaccccaccccattggcacccgttacctcacccgtcccctgtaa

SEQ ID NO: 3398 - DNA, 2211 bp, Artificial Sequence
  Synthetic polynucleotide
atggctgccgatggttatcttccagattggctcgaggacaacctctctgagggcattcgcgagtggtgggcgctgaaacctggagccccgaagcccaaagccaaccagcaaaagcaggacgacggccggggtctggtgcttcctggctacaagtacctcggacccttcaacggactcgacaagggggagcccgtcaacgcggcggacgcagcggccctcgagcacgacaaggcctacgaccagcagctcaaagcgggtgacaatccgtacctgcggtataaccacgccgacgccgagtttcaggagcgtctgcaagaagatacgtcttttgggggcaacctcgggcgagcagtcttccaggccaagaagcgggttctcgaaccttttggtctggttgaggaaggtgctaagacggctcctggaaagaaacgtccggtagagcagtcgccacaagagccagactcctcctcgggcatcggcaagacaggccagcagcccgctaaaaagagactcaattttggtcagactggcgactcagagtcagtccccgacccacaacctctcggagaacctccagcaacccccgctgctgtgggacctactacaatggcttcaggcggtggcgcaccaatggcggacaataacgaaggcgccgacggagtgggtaatgcctcaggaaattggcattgcgattccacatggctgggcgacagagtcatcaccaccagcacccgcacctgggccttgcccacctacaataaccacctctacaagcaaatctccagtgcttcaacgggggccagcaacgacaaccactacttcggctacagcaccccctgggggtattttgacttcaacagattccactgccacttttcaccacgtgactggcaaagactcatcaacaacaactggggattccggcctaagcgactcaacttcaagctcttcaacattcaggtcaaagaggttacggacaacaatggagtcaagaccatcgccaataaccttaccagcacggtccaggtcttcacggactcggagtaccagttgccgtacgtcctcggctctgcgcaccagggctgcctccctccgttcccggcggacgtgttcatgattccgcagtacggctacctaacgctcaacaatggcagccaggcagtgggacggtcatccttttactgcctggaatatttcccatcgcagatgctgagaacgggcaacaactttaccttcagctacacctttgaggacgttcctttccacagcagctacgctcacagccagagtctggaccgtctcatgaatcctctgattgaccagtacctgtactacttgtctcggactcaaacaacaggaggcacgggaaatacgcagactctgggcttcagccaaggtgggcctaatacaatggccaatcaggcaaagaactggctgccaggaccctgttaccgccaacaacgcgtctcaacgacaaccgggcaaaacaacaatagcaactttgcctggactgctgggaccaaataccatctgaatggaagaaattcattggctaatcctggcatcgctatggcaacacacaaagacgacaaggagcgtttttttcccagtaacgggatcctgatttttggcaaacaaaatgctgccagagacaatgcggattacagcgatgtcatgctcaccagcgaggaagaaatcaaaaccactaaccctgtggctacagaggaatacggtatcgtggcagataacttgcagcagcaaaacacggctcctcaaattggaactgtcaacagccagggggccttacccggtatggtctggcagaaccgggacgtgtacctgcagggtcccatctgggccaagattcctcacacggacggcaacttccacccgtctccgctgatgggcggctttggcctgaaacatcctccgcctcagatcctgatcaagaacacgcctgtacctgcggatcctccgaccaccttcaaccagtcaaagctgaactctttcatcacgcaatacagcaccggacaggtcagcgtggaaattgaatgggagctgcagaaggaaaacagcaagcgctggaaccccgagatccagtacacctccaactactacaaatctacaagtgtggactttgctgttaatacagaaggcgtgtactctgaaccccaccccattggcacccgttacctcacccgtcccctgtaa

SEQ ID NO: 3399 - DNA, 2211 bp, Artificial Sequence
  Synthetic polynucleotide
atggctgccgatggttatcttccagattggctcgaggacaacctctctgagggcattcgcgagtggtgggacttgaaacctggagccccgaaacccaaagccaaccagcaaaagcaggacgacggccggggtctggtgcttcctggctacaagtacctcggacccttcaacggactcgacaagggggagcccgtcaacgcggcggacgcagcggccctcgagcacgacaaggcctacgaccagcagctcaaagcgggtgacaatccgtacctgcggtataaccacgccgacgccgagtttcaggagcgtctgcaagaagatacgtcttttgggggcaacctcgggcgagcagtcttccaggccaagaagcgggttctcgaacctctcggtctggttgaggaaggcgctaagacggctcctggaaagaagaggcctgtagagcagtcgccacaagagccagactcctcctcgggcatcggcaagacaggccagcagcccgctaaaaagagactcaattttggtcagactggcgactcagagtcagtccccgatccacaacctctcggagaacctccagcaacccccgctgctgtgggacctactacaatggcttcaggcggtggcgcaccaatggcagacaataacgaaggcgccgacggagtgggtagttcctcgggaaattggcattgcgattccacatggctgggcgacagagtcatcaccaccagcacccgaacatgggccttgcccacctataacaaccacctctacaagcaaatctccagtgcttcaacgggggccagcaacgacaaccactacttcggctacagcaccccctgggggtattttgacttcaacagattccactgccacttctcaccacgtgactggcagcgactcatcaacaacaactggggattccggcctaagcgactcaacttcaagctcttcaacatccaggtcaaggaggtcacgcagaatgaaggcaccaagaccatcgccaataacctcaccagcaccatccaggtgtttacggactcggagtaccagcttccgtacgtcctcggctctgcgcaccagggctgcctccctccgttcccggcggacgtgttcatgattccgcagtacggctacctaacgctcaacaatggcagccaggcagtgggacggtcatccttttactgcctggaatatttcccatcgcagatgctgagaacgggcaacaactttaccttcagctacacctttgaggacgttcctttccacagcagctacgcgcacagccagagcttggaccggctgatgaatcctctgattgaccagtacctgtactacttgtctcggactcaaacaacaggaggcacggcaaatacgcagactctgggcttcagccaaggtgggcctaatacaatggccaatcaggcaaagaactggctgccaggaccctgttaccgccaacaacgcgtctcaacgacaaccgggcaaaacaacaatagcaactttgcctggactgctgggaccaaataccatctgaatggaagaaattcattggctaatcctggcatcgctatggcaacacacaaagacgacaaggagcgtttttttcccagtaacgggatcctgatttttggcaaacaaaatgctgccagagacaatgcggattacagcgatgtcatgctcaccagcgaggaagaaatcaaaaccactaaccctgtggctacagaggaatacggtatcgtggcagataacttgcagcagcaaaacacggctcctcaaattggaactgtcaacagccagggggccttacccggtatggtctggcagaaccgggacgtgtacctgcagggtcccatctgggccaagattcctcacacggacggcaacttccacccgtctccgctgatgggcggctttggcctgaaacatcctccgcctcagatcctgatcaagaacacgcctgtacctgcggatcctccgaccaccttcaaccagtcaaagctgaactctttcatcacgcaatacagcaccggacaggtcagcgtggaaattgaatgggagctgcagaaggaaaacagcaagcgctggaaccccgagatccagtacacctccaactactacaaatctacaagtgtggactttgctgttaatacagaaggcgtgtactctgaaccccaccccattggcacccgttacctcacccgtcccctgtaa

SEQ ID NO: 3400 - DNA, 2211 bp, Artificial Sequence
  Synthetic polynucleotide
atggctgccgatggttatcttccagattggctcgaggacaacctctctgagggcattcgcgagtggtgggcgctgaaacctggagccccgaagcccaaagccaaccagcaaaagcaggacgacggccggggtctggtgcttcctggctacaagtacctcggacccttcaacggactcgacaagggggagcccgtcaacgcggcggatgcagcggccctcgagcacgacaaggcctacgaccagcagctcaaagcgggtgacaatccgtacctgcggtataaccacgccgacgccgagtttcaggagcgtctgcaagaagatacgtcttttgggggcaacctcgggcgagcagtcttccaggccaagaagcgggttctcgaacctctcggtctggttgaggaaggcgctaagacggctcctggaaagaaacgtccggtagagcagtcgccacaagagccagactcctcctcgggcatcggcaagacaggccagcagcccgctaaaaagagactcaattttggtcagactggcgactcagagtcagtccccgacccacaacctctcggagaacctccagcaacccccgctgctgtgggacctactacaatggctgcaggcggtggcgcaccaatggcagacaataacgaaggcgccgacggagtgggtagttcctcgggaaattggcattgcgattccacatggatgggcgacagagtcatcaccaccagcacccgaacctgggccttgcccacctataacaaccatctctacaagcaaatctccagtgcttcaacgggggccagcaacgacaaccactacttcggctacagcaccccctgggggtattttgacttcaacagattccactgccacttctcaccacgtgactggcagcgactcatcaacaacaactggggattccggcccaagagactcagcttcaagctcttcaacatccaggtcaaggaggtcacgcagaatgaaggcaccaagaccatcgccaataacctcaccagcaccatccaggtgtttacggactcggagtaccagctgccgtacgtcctcggctctgcgcaccagggctgcctccctccgttcccggcggacgtgttcatgattccgcagtacggctacctaacgctcaacaatggcagccaggcagtgggacggtcatccttttactgcctggaatatttcccatcgcagatgctgagaacgggcaacaactttaccttcagctacacctttgaggacgttcctttccacagcagctacgctcacagccagagcttggaccggctgatgaatcctctgattgaccagtacctgtactacttgtctcggactcaaacaacaggaggcacggcaaatacgcagactctgggtttcagccaaggtgggcctaatacaatggccaatcaggcaaagaactggctgcaaggaccctgttaccgccaacaacgcgtctcaacgacaaccgggcaaaacaacaatagcaactttgcctggactgctgggaccaaataccatctgaatggaagaaattcattggctaatcctggcatcgctatggcaacacacaaagacgacaaggagcgtttttttcccagtaacgggatcctgatttttggcaaacaaaatgctgccagagacaatgcggattacagcgatgtcatgctcaccagcgaggaagaaatcaaaaccactaaccctgtggctacagaggaatacggtatcgtggcagataacttgcagcagcaaaacacggctcctcaaattggaactgtcaacagccagggggccttacccggtatggtctggcagaacctggacgtgtacctgcagggtcccatctgggccaagattcctcacacggacggcaacttccacccgtctccgctgatgggcggctttggcctgaaacatcctccgcctcagatcctgatcaagaacacgcctgtacctgcggatcctccgaccaccttcaaccagtcaaagctgaactctttcatcacgcaatacagcaccggacaggtcagcgtggaaattgaatgggagctgcagaaggaaaacagcaagcgctggaaccccgagatccagtacacctccaactactacaaatctacaagtgtggactttgctgttaatacagaaggcgtgtactctgaaccccaccccattggcacccgttacctcacccgtcccctgtaa

SEQ ID NO: 3401 - DNA, 2214 bp, Artificial Sequence
  Synthetic polynucleotide
atggctgccgatggttatcttccagattggctcgaggacaacctctctgagggcattcgcgagtggtgggcgctgaaacctggagccccgaagcccaaagccaaccagcaaaagcaggacgacggccggggtctggtgcttcctggctacaagtacctcggacccttcaacggactcgacaagggagagcccgtcaacgcggcggacgcagcggccctcgagcacgacaaggcctacgaccagcagctcaaagcgggtgacaatccgtacctgcggtataaccacgccgacgccgagtttcaggagcgtctgcaagaagatacgtcttttgggggcaacctcgggcgagcagtcttccaggccaagaagcgggttctcgaacctctcggtctggttgaggaaggcgctaagacggctcctggaaagaagagaccggtagagccatcaccccagcgttctccagactcctcctcgggcatcggcaagacaggccagcagcccgctaaaaagagactcaattttggtcagactggcgactcagagtcagtccccgacccacaacctctcggagaacctccagcaacccccgctgctgtgggacctactacaatggcttcaggtggtggcgcaccaatggcagacaataacgaaggcgccgacggagtgggtaatgcctcaggaaattggcattgcgattcccaatggctgggcgacagagtcatcaccaccagcacccgaacatgggccttgcccacctataacaaccacctctacaagcaaatctccagtgcttcaacgggggccagcaacgacaaccactacttcggctacagcaccccctgggggtattttgacttcaacagattccactgccacttttcaccacgtgactggcagcgactcatcaacaacaactggggattccggcctaagcgactcaacttcaagctcttcaacattcaggtcaaagaggttacggacaacaatggagtcaagaccatcgccaataaccttaccagcacggtccaggtcttcacggactcagactatcagctcccgtacgtgctcgggtcggctcacgagggctgcctcccgccgttcccagcggacgttttcatgattccccagtacggctacctaacactcaacaacggtagtcaggccgtgggacgctcctccttctactgcctggaatactttccttcgcagatgctgagaaccggcaacaacttccagtttacttacaccttcgaggacgtgcctttccacagcagctacgctcacagccagagcttggaccggctgatgaatcctctgattgaccagtacctgtactacttgtctcggactcaaacaacaggaggcacggcaaatacgcagactttgggcttcagccaaggtgggcctaatacaatggccaatcaggcaaagaactgggtgccaggaccctgttaccgccaacaacgggtttcaacggcaaccgggcaaaacaacaatagcaactttgcctggactgctgggaccaaataccatctgaaaggaagaaattcattggctaatcctggcatcgctatggcaacacacaaagacgacaaggagcgtttttttcccagtaacgggatcctgatttttggcaaacaaaatgctgccagagacaatgcggattacagcgatgtcatgctcaccagcgaggaagaaatcaaaaccactaaccctgtggctacagaggaatacggtatcgtggcagataacttgcagcagcaaaacacggctcctcaaattggaactgtcaacagccagggggccttacccggtatggtctggcagaaccgggacgtgtacctgcagggtcccatctgggccaagattcctcacacggacggcaacttccacccgtctccgctgatgggcggctttggcctgaaacatcctccgcctcagatcctgatcaagaacacgcctgtacctgcggatcctccgaccaccttcaaccagtcaaagctgaactctttcatcacgcaatacagcaccggacaggtcagcgtggaaattgaatgggagctgcagaaggaaaacagcaaacgctggaacccagagattcaatacacttccaactactacaaatctacaagtgtggactttgctgttaatacagaaggcgtgtactctgaaccccaccccattggcacccgttacctcacccgtcccctgtaa

SEQ ID NO: 3402 - DNA, 2214 bp, Artificial Sequence
  Synthetic polynucleotide
  modified_base (676)..(676): a, c, g, or t
  misc_feature (676)..(676): n is a, c, g, or t
  modified_base (697)..(697): a, c, g, or t
  misc_feature (697)..(697): n is a, c, g, or t
  modified_base (715)..(715): a, c, g, or t
  misc_feature (715)..(715): n is a, c, g, or t
  modified_base (748)..(748): a, c, g, or t
  misc_feature (748)..(748): n is a, c, g, or t
  modified_base (750)..(750): a, c, g, or t
  misc_feature (750)..(750): n is a, c, g, or t
  modified_base (757)..(757): a, c, g, or t
  misc_feature (757)..(757): n is a, c, g, or t
  modified_base (763)..(763): a, c, g, or t
  misc_feature (763)..(763): n is a, c, g, or t
atggctgccgatggttatcttccagattggctcgaggacactctctctgaaggaataagacagtggtggaagctcaaacctggcccaccaccaccaaagcccgcagagcggcataaggacgacagcaggggtcttgtgcttcctgggtacaagtacctcggacccttcaacggactcgacaagggagagccggtcaacgaggcagacgccgcggccctcgagcacgacaaagcctacgaccggcagctcgacagcggagacaacccgtacctcaagtacaaccacgccgacgcggagtttcaggagcgccttaaagaagatacgtcttttgggggcaacctcggacgagcagtcttccaggcgaaaaagagggttcttgaacctctcggtctggttgaggaaggcgctaagacggctcctggaaagaaacgtccggtagagcagtcgccacaagagccagactcctcctcgggcatcggcaagacaggccagcagcccgctaaaaagagactcaattttggtcagactggcgactcagagtcagtccccgacccacaacctctcggagaacctccagcaacgccctctggtgtgggacctaatacaatggctgcaggcggtggcgctccaatggcagacaataacgaaggcgccgacggagtgggtagttcctcangaaattggcattgcgattccncatggctgggcgacagantcatcaccaccagcacccgaacctgggccctgncnacctacnacaacnacctctacaagcaaatctccaacagcacatctggaggagccaccaacgacaacacctacttcggctacagcaccccctgggggtattttgactttaacagattccactgccacttttcaccacgtgactggcagcgactcatcaacaacaactggggattccggcctaagcgactcaacttcaagctcttcaacatccaggtcaaggaggtcacgcagaatgaaggcaccaagaccatcgccaataacctcaccagcaccatccaggtgtttacggactcggagtaccagctgccgtacgttctcggctctgcccaccagggctgcctgcctccgttcccggcggacgtgttcatgattccccagtacggctacctaacactcaacaacggtagtcaggccgtgggacgctcctccttctactgcctggaatactttccttcgcagatgctgagaaccggcaacaacttccagtttacttacaccttcgaggacgtgcctttccacagcagctacgcccacagccagagcttggaccggctgatgaatcctctgattgaccagtacctgtactacttgtctcggactcaaacaacaggaggcacggcaaatacgcagactctgggcttcagccaaggtgggcctaatacaatggccaatcaggcaaagaactggctgccaggaccctgttaccgccaacaacgcgtctcaacgacaaccgggcaaaacaacaatagcaactttgcctggactgctgggaccaaataccatctgaatggaagaaattcattggctaatcctggcatcgctatggcaacacacaaagacgacaaggagcgtttttttcccagtaacgggatcctgatttttggcaaacaaaatgctgccagagacaatgcggattacagcgatgtcatgctcaccagcgaggaagaaatcaaaaccactaaccctgtggctacagaggaatacggtatcgtggcagataacttgcagcagcaaaacacggctcctcaaattggaactgtcaacagccagggggccttacccggtatggtttggcagaaccgggacgtgtacctgcagggtcctatctgggccaagattcctcacacggacggaaactttcatccctcgccgctgatgggaggctttggactgaaacacccgcctcctcagatcctgattaagaatacacctgttcccgcggatcctccaactaccttcagtcaagctaagctggcgtcgttcatcacgcaatacagcacaggacaagtgagtgtggaaattgaatgggagctgcagaaagaaaacagcaagcgctggaatcccgaagtgcagtacacatccaattatgcaaaatctgccaacgttgattttactgtggacaacaatggactttatactgagcctcgccccattggcacccgttaccttacccgtcccctgtaa

SEQ ID NO: 3403 - DNA, 2214 bp, Artificial Sequence
  Synthetic polynucleotide
atggctgccgatggttatcttccagattggctcgaggacaacctctctgagggcattcgcgagtggtgggacttgaaacctggagccccgaagcccaaagccaaccagcaaaagcaggacgacggccggggtctggtgcttcctggctacaagtacctcggacccttcaacggactcgacaagggggagcccgtcaacgcggcggacgcagcggccctcgagcacgacaaggcctacgaccagcagctcaaagcgggtgacaatccgtacctgcggtataaccacgccgacgccgagtttcaggagcgtctgcaagaagatacgtcttttgggggcaacctcgggcgagcagtcttccaggccaagaagcgggttctcgaacctctcggtctggttgaggaaggcgctaagacggctcctggaaagaagagaccggtagagccatcaccccagcgttctccagactcctctacgggcatcggcaagaaaggccagcagcccgcgaaaaagagactcaactttgggcagactggcgactcagagtcagtgcccgaccctcaaccaatcggagaaccccccgcaggcccctctggtgtgggatctcttacaatggcttcaggtggtggcgcaccagtggcagacaataacgaaggtgccgatggagtgggtagttcctcgggaaattggcattgcgattcccaatggctgggggacagagtcatcaccaccagcacccgaacatgggccttgcccacctataacaaccacctctacaagcaaatctccagtgcttcaacgggggccagcaacgacaaccactacttcggctacagcaccccctgggggtattttgactttaacagattccactgccacttctcaccacgtgactggcagcgactcatcaacaacaactggggattccggcccaagagactcaacttcaagctcttcaacatccaggtcaaggaggtcacggacaatgatggagtcaagaccatcgccaataaccttaccagcacgattcaggtctttacggactcggaataccagttgccgtacgtcctcggctctgcgcaccagggctgcctgcctccgttcccggcggacgtgttcatgattccgcagtacggctacctaacgctcaacaatggcagccaggcagtgggacggtcatccttttactgcctggaatatttcccatcgcagatgctgagaacgggcaacaactttaccttcagctacacttttgaggacgttcctttccacagcagctacgctcacagccagagtctggaccgtctcatgaatcctctgattgaccagtacctgtactacttgtctcggactcaaacaacaggaggcacggcaaatacgcagactctgggcttcagccaaggtgggcctaatacaatggccaatcacgcaaagaactggctgccaggaccctgttaccgccaacaacgcgtctcaacgacaaccggacaaaacaacaatagcaactttgcctggactgctgggaccaaataccatctgaatggaagaaattcattggctaatcctggcatcgctatggcaacacacaaagacgacaaggagcgtttttttcccagtaacgggatcctgatttttggcaaacaaaatgctgccagagacaatgcggattacagcgatgtcatgctcaccagcgaggaagaaatcaaaaccactaaccctgtggctacagaggaatacggtatcgtggcagataacttgcagcagcaaaacacggctcctcaaattggaactgtcaacagccagggggccttacccggtatggtctggcagaaccgggacgtgtacctgcagggtcccatctgggccaagattcctcacacggacggcaacttccacccgtctccgctgatgggcggctttggcctgaaacatcctccgcctcagatcctgatcaagaacacgcctgtacctgcggatcctccgaccaccttcaaccagtcaaagctgaactctttcatcacgcaatacagcaccggacaggtcagcgtggaaattgaatgggagctgcagaaggaaaacagcaagcgctggaaccccgagatccagtacacctccaactactacaaatctacaagtgtggactttgctgttaatacagaaggcgtgtactctgaaccccaccccattggcacccgttacctcacccgtcccctgtaa

SEQ ID NO: 3404 - DNA, 2211 bp, Artificial Sequence
  Synthetic polynucleotide
atggctgccgatggttatcttccagattggctcgaggacactctctctgaaggaataagacagtggtggaagctcaaacctggcccaccaccaccaaagcccgcagagcggcacaaggacgacagcaggggtcttgtgcttcctgggtacaagtacctcggacccttcaacggactcgacaagggagagccggtcaacgaggcagacgccgcggccctcgagcacgacaaagcctacgaccggcagctcgacagcggagacaacccgtacctcaagtacaaccacgccgacgcggagtttcaggagcgccttaaagaagatacgtcttttgggggcaacctcggacgagcagtcttccaggcgaaaaagagggttcttgaacctctgggcctggttgaggaacctgttaagacggctccgggaaaaaagaggccggtagagcactctcctgtggagccagactcctcctcgggaaccggaaaggcgggccagcagcctgctaaaaagagactcaattttggtcagactggcgactcagagtcagtccccgacccacaacctctcggagaacctccagcaacccccgctgctgtgggacctactacaatggcttcaggtggtggcgcaccaatggcagacaataacgaaggcgccgacggagtgggtaatgcctcaggaaattggcattgcgattccacatggctgggcgacagagtcatcaccaccagcacccgcacctgggccttgcccacctacaataaccacctctacaagcaaatctccagtgcttcaacgggggccagcaacgacaaccactacttcggctacagcaccccctgggggtattttgacttcaacagattccactgccacttctcaccacgtgactggcagcgactcatcaacaacaactggggattccggcccaagagactcaacttcaaactcttcaacatccaagtcaaggaggtcacgcagaatgaaggcaccaagaccatcgccaataacctcaccagcaccatccaggtgtttacggactcggagtaccagctgccgtacgttctcggctctgcccaccagggctgcctgcctccgttcccggcggacgtgttcatgattccccagtacggctacctaacactcaacaacggtagtcaggccgtgggacgctcctccttctactgcctggaatactttccttcgcagatgctgagaaccggcaacaacttccagtttacttacaccttcgaggacgtgcctttccacagcagctacgcgcacagccagagcttggaccggctgatgaatcctctgattgaccagtacctgtactacttgtctcggactcaaacaacaggaggcacggcaaatacgcagactctgggcttcagccaaggtgggcctaatacaatggccaatcaggcaaagaactggctgccaggaccctgttaccgccaacaacgcgtctcaacgacaaccgggcaaaacaacaatagcaactttgcctggactgctgggaccaaataccatctgaatggaagaaattcattggctaatcctggcatcgctatggcaacacacaaagacgacaaggagcgtttttttcccagtaacgggatcctgatttttggcaaacaaaatgctgccagagacaatgcggattacagcgatgtcatgctcaccagcgaggaagaaatcaaaaccactaaccctgtggctacagaggaatacggtatcgtggcagataacttgcagcagcaaaacacggctcctcaaattggaactgtcaacagccagggggccttacccggtatggtctggcagaaccgggacgtgtacctgcagggtcccatctgggccaagattcctcacacggacggcaacttccacccgtctccgctgatgggcggctttggcctgaaacatcctccgcctcagatcctgatcaagaacacgcctgtacctgcggatcctccgaccaccttcaaccagtcaaagctgaactctttcatcacgcaatacagcaccggacaggtcagcgtggaaattgaatgggagctgcagaaggaaaacagcaagcgctggaaccccgagatccagtacacctccaactactacaaatctacaagtgtggactttgctgttaatacagaaggcgtgtactctgaaccccaccccattggcacccgttacctcacccgtcccctgtaa

SEQ ID NO: 3405 - DNA, 2211 bp, Artificial Sequence
  Synthetic polynucleotide
atggctgccgatggttatcttccagattggctcgaggacaacctctctgagggcattcgcgagtggtgggcgctgaaacctggagccccgaagcccaaagccaaccagcaaaagcaggacgacggccggggtctggtgcttcctggctacaagtacctcggacccttcaacggactcgacaagggggagcccgtcaacgcggcggatgcagcggccctcgagcacgacaaggcctacgaccagcagctccaagcgggtgacaatccgtacctgcggtataaccacgccgacgccgagtttcaggagcgtcttcaaggagatacgtcttttgggggcaacctcggacgagcagtcttccaggccaagaagcgggttctcgaacctctcggtctggttgaggaaggcgctaagacggctcctggaaagaaacgtccggtagagcagtcgccacaagagccagactcctcctcgggcatcggcaagacaggccagcagcccgctaaaaagagactcaattttggtcagactggcgactcagagtcagtccccgacccacaacctctcggagaacctccagcaacccccgctgctgtgggacctactacaatggcttcaggcggtggcgcaccaatggcggacaataacgaaggcgccgatggagtgggtaatgcctcaggaaattggcattgcgattccacatggctgggcgacagagtcatcaccaccagcacccgcacctgggccttgcccacctacaataaccacctctacaagcaaatctccagtgcttcaacgggggccagcaacgacaaccactacttcggctacagcaccccctgggggtattttgacttcaacagattccactgccacttctcaccacgtgactggcagcgactcatcaacaacaactggggattccggcctaagcgactcaacttcaagctcttcaacattcaggtcaaagaggttacggacaacaatggagtcaagaccatcgccaataacctcaccagcaccatccaggtgtttacggactcggagtaccagctgccgtacgttctcggctctgcccaccagggctgcctgcctccgttcccggcggacgtgttcatgattccccagtacggctacctaacactcaacaacggtagtcaggccgtgggacgctcctccttctactgcctggaatactttccttcgcagatgctgagaaccggcaacaacttccagtttacttacaccttcgaggacgtgcctttccacagcagctacgcccacagccagagcttggaccggctgatgaatcctctgattgaccagtacctgtactacttgtctcggactcaaacaacaggaggcacggcaaatacgcagactctgggcttcagccaaggtgggcctaatacaatggccaatcaggcaaagaactggctgccaggaccctgttaccgccaacaacgcgtctcaacgacaaccgggcaaaacaacaatagcaactttgcctggactgctgggaccaaataccatctgaatggaagaaattcattggctaatcctggcatcgctatggcaacacacaaagacgacaaggagcgtttttttcccagtaacgggatcctgatttttggcaaacaaaatgctgccagagacaatgcggattacagcgatgtcatgctcaccagcgaggaagaaatcaaaaccactaaccctgtggctacagaggaatacggtatcgtggcagataacttgcagcagcaaaacacggctcctcaaattggaactgtcaacagccagggggccttacccggtatggtctggcagaaccgggacgtgtacctgcagggtcccatctgggccaagattcctcacacggacggcaacttccacccgtctccgctgatgggcggctttggcctgaaacatcctccgcctcagatcctgatcaagaacacgcctgtacctgcggatcctccgaccaccttcaaccagtcaaagctgaactctttcatcacgcaatacagcaccggacaggtcagcgtggaaattgaatgggagctgcagaaggaaaacagcaagcgctggaaccccgagatccagtacacctccaactactacaaatctacaagtgtggactttgctgttaatacagaaggcgtgtactctgaaccccaccccattggcacccgttacctcacccgtcccctgtaa

SEQ ID NO: 3406 - DNA, 2217 bp, Artificial Sequence
  Synthetic polynucleotide
atggctgccgatggttatcttccagattggctcgaggacactctctctgaaggaataagacagtggtggaagctcaaacctggcccaccaccaccaaagcccgcagagcggcataaggacgacagcaggggtcttgtgcttcctgggtacaagtacctcggacccttcaacggactcgacaagggggagcccgtcaacgcggcggatgcagcggccctcgagcacgacaaggcctacgaccagcagctcaaagcgggtgacaatccgtacctgcggtataaccacgccgacgcggagtttcaggagcgccttaaagaagatacgtcttttgggggcaacctcggacgagcagtcttccaggcgaaaaagagggttcttgaacctctcggtctggttgaggaaggcgctaagacggctcctggaaagaagagaccggtagagccatcaccccagcgttctccagactcctctacgggcatcggcaagaaaggccaacagcccgccagaaaaagactcaattttggtcagactggcgactcagagtcagttccagaccctcaacctctcggagaacctccagcagcgccctctggtgtgggacctaatacaatggctgcaggcggtggcgcaccaatggcagacaataacgaaggcgccgacggagtgggtagttcctcgggaaattggcattgcgattcccaatggctgggggacagagtcatcaccaccagcaccagaacctgggccctgcccacctacaacaatcacctctacaagcaaatctccaacagcacatctggaggatcttcaaatgacaacgcctacttcggctacagcaccccctgggggtattttgacttcaaccgcttccactgccacttctcaccacgtgactggcagcgactcatcaacaacaactggggattccggcccaagagactcaacttcaagctcttcaacattcaggtcaaagaggttacggacaacaatggagtcaagaccatcgccaataaccttaccagcacggtccaggtctttacggactcggagtaccagttgccgtacgtcctcggctctgcgcaccagggctgcctccctccgttcccggcggacgtgttcatgattccccagtacggctacctaacactcaacaacggtagtcaggccgtgggacgctcctccttctactgcctggaatatttcccttctcagatgctgagaacgggcaacaactttaccttcagctacacctttgaggacgttcctttccacagcagctacgctcacagccagagtctggaccgtctcatgaatcctctgattgaccagtacctgtactacttgtctcggactcaaacaacaggaggcacggcaaatacgcagactctgggcttcagccaaggtgggcctaatacaatggccaatcaggcaaagaactggctgccaggaccctgttaccgccaacaacgcgtctcaacgacaaccgggcaaaacaacaatagcaactttgcctggactgctgggaccaaataccatctgaatggaagaaattcattggctaatcctggcatcgctatggcaacacacaaagacgacaaggagcgtttttttcccagtaacgggatcctgatttttggcaaacaaaatgctgccagagacaatgcggattacagcgatgtcatgctcaccagcgaggaagaaatcaaaaccactaaccctgtggctacagaggaatacggtatcgtggcagataacttgcagcagcaaaacacggctcctcaaattggaactgtcaacagccagggggccttacccggtatggtctggcagaaccgggacgtgtacctgcagggtcccatctgggcaaagattccacacacggacggacattttcacccctctcccctcatgggtggattcggacttaaacaccctcctccacagattctcatcaagaacaccccggtacctgcgaatcctccgaccaccttcaaccagtcaaagctgaactctttcatcacgcaatacagcacaggacaagtgagtgtggaaattgaatgggagctgcagaaagaaaacagcaagcgctggaatcccgaagtgcagtacacatccaattatgcaaaatctgccaacgttgattttactgtggacaacaatggactttatactgagcctcgccccattggcacccgttaccttacccgtcccctgtaa

SEQ ID NO: 3407 - DNA, 2211 bp, Artificial Sequence
  Synthetic polynucleotide
atggctgccgatggttatcttccagattggctcgaggacaacctctctgagggcattcgcgagtggtgggcgctgaaacctggagccccgaaacccaaagccaaccagcaaaagcaggacgacggccggggtctggtgcttcctggctacaagtacctcggacccttcaacggactcgacaagggggagcccgtcaacgcggcggacgcagcggccctcgagcacgacaaggcctacgaccagcagctcaaggcgggtgacaatccgtacctgcggtataaccacgccgacgccgagtttcaggagcgtctgcaagaagatacgtcttttgggggcaacctcgggcgagcagtcttccaggccaaaaagaggcttcttgaacctcttggtctggttgaggaaggggctaagacggctcctggaaagaaacgtccggtagagcagtcgccacaagagccagactcctcctcgggcattggcaagacaggccagcagcccgctaaaaagagactcaactttgggcagactggcgactcagagtcagtgcccgatcctcaacctctcggagaacctccagcaacccccgctgctgtgggacctactacaatggcttcaggcggtggcgcaccaatggcggacaataacgaaggcgccgatggagtgggtaattcctcgggaaattggcattgcgattccacatggatgggcgacagagtcatcaccaccagcacccgaacctgggccctgcccacctacaacaatcacctctacaagcaaatctccagtgcttcaacgggggccagcaacgacaaccactacttcggctacagcaccccctgggggtattttgatttcaacagattccactgccatttttcaccacgtgactggcagcgactcatcaacaacaactggggattccggcccaagagactcaacttcaagctcttcaacatccaggtcaaggaggtcacgcagaatgaaggcaccaagaccatcgccaataaccttaccagcacgattcaggtctttacggattcggaataccagctcccgtacgtcctcggctctgcgcaccagggctgcctccctccgttcccggcggacgtgttcattattccgcagtacggctacctaacgctcaacaatggtagccaggcagtgggacggtcatccttttactgcctggaatatttcccatcgcagatgctgagaacgggcaacaactttaccttcagctacacctttgaggacgttcctttccacagcagctacgctcacagccagagtctggaccgtctcatgaatcctctgattgaccagtacctgtactacttgtctcggactcaaacaacaggaggcacggcaaatacgcagactctgggcttcagccaaggtgggcctaatacaatggccaatcaggcaaagaactggctgccaggaccctgttaccgccaacaacgcgtctcaacgacaaccgggcaaaacaacaatagcaactttgcctggactgctgggaccaaataccatctgaatggaagaaattcattggctaatcctggcatcgctatggcaacacacaaagacgacaaggagcgtttttttcccagtaacgggatcctgatttttggcaaacaaaatgctgccagagacaatgcggattacagcgatgtcatgctcaccagcgaggaagaaatcaaaaccactaaccctgtggctacagaggaatacggtatcgtggcagataacttgcagcagcaaaacacggctcctcaaattggaactgtcaacagccagggggccttacccggtatggtctggcagaaccgggacgtgtacctgcagggtcccatctgggccaagattcctcacacggacggcaacttccacccgtctccgctgatgggcggctttggcctgaaacatcctccgcctcagatcctgatcaagaacacgccagtacctgcggatcctccgaccaccttcaaccagtcaaagctgaactctttcatcacgcaatacagcaccggacaggtcagcgtggaaattgaatgggagctgcagaaggaaaacagcaagcgctggaaccccgagatccagtacacctccaactactacaaatctacaagtgtggactttgctgttaatacagaaggcgtgtactctgaaccccaccccattggcacccgttacctcacccgtcccctgtaa

SEQ ID NO: 3408 - DNA, 2211 bp, Artificial Sequence
  Synthetic polynucleotide
atggctgccgatggttatcttccagattggctcgaggacaacctctctgagggcattcgcgagtggtgggcgctgaaacctggagccccgaaacccaaagccaaccagcaaaagcaggacgacggccggggtctggtgcttcctggctacaagtacctcggacccttcaacggactcgacaagggggagcccgtcaacgcggcggatgcagcggccctcgagcacgacaaggcctacgaccagcagctcaaggcgggtgacaatccgtacctgcggtataaccacgccgacgccgagtttcaggagcgtctgcaagaagatacgtcttttgggggcaacctcgggcgagcagtcttccaggccaaaaagagggttcttgaaccttttggtctggttgaggaagctgctaagacggctcctggaaagaaacgtccggtagagcagtcgccacaagagccagactcctcctcgggcattggcaagacaggccagcagcccgctaaaaagagactcaattttggtcagactggcgactcagagtcagtgcccgaccctcaacctctcggagaacctccagcaacccccgctgctgtgggacctactacaatggcttcaggcggtggcgcaccaatggcagacaataacgaaggcgccgatggagtgggtaatgcctcaggaaattggcattgcgattccacatggctgggcgacagagtcatcaccaccagcacccgaacctgggccctgcccacctacaacaatcacctctacaagcaaatctccagtgcttcaacgggggccagcaacgacaaccactacttcggctacagcaccccctgggggtattttgactttaacagattccactgccacttttcaccacgtgactggcagcgactcatcaacaacaactggggattccggcccaagagactcaacttcaagctcttcaacatccaggtcaaggaggtcacgcagaatgaaggcaccaagaccatcgccaataacctcaccagcaccattcaggtctttacggattcggaataccagctcccgtacgtcctcggctctgcccaccagggctgcctccctccgttcccggcggacgtgttcatgattccgcagtacggctacctaacgctcaacaatggtagccaggcagtgggacggtcatccttttactgcctggaatatttcccatcgcagatgctgagaacgggcaacaactttaccttcagctacacctttgaggacgttcctttccacagcagctacgctcacagccagagtctggaccgtctcatgaatcctctgattgaccagtacctgtactacttgtctcggactcaaacaacaggaggcacggcaaatacgcagactctgggcttcagccaaggtgggcctaatacaatggccaatcacgcaaagaactggctgccaggaccctgttaccgccaacaacgcgtctcaacgacaaccgggcaaaacaacaatagcaactttgcctggactgctgggaccaaataccatctgaatggaagaaattcattggctaatcctggcatcgctatggcaacacacaaagacgacaaggagcgtttttttcccagtaacgggatcctgatttttggcaaacaaaatgctgccagagacaatgcggattacagcgatgtcatgctcaccagcgaggaagaaatcaaaaccactaaccctgtggctacagaggaatacggtatcgtggcagataacttgcagcagcaaaacacggctcctcaaattggaactgtcaacagccagggggccttacccggtatggtctggcagaaccgggacgtgtacctgcagggtcccatctgggccaagattcctcacacggacggcaacttccacccgtctccgctgatgggcggctttggcctgaaacatcctccgcctcagatcctgatcaagaacacgcctgtacctgcggatcctccgaccaccttcaaccagtcaaagctgaactctttcatcacgcaatacagcaccggacaggtcagcgtggaaattgaatgggagctgcagaaggaaaacagcaagcgctggaaccccgagatccagtacacctccaactactacaaatctacaagtgtggactttgctgttaatacagaaggcgtgtactctgaaccccaccccattggcacccgttacctcacccgtcccctgtaa

SEQ ID NO: 3409 - DNA, 2211 bp, Artificial Sequence
  Synthetic polynucleotide
atggctgccgatggttatcttccagattggctcgaggacaacctctctgagggcattcgcgagtggtgggcgctgaaacctggagccccgaagcccaaagccaaccagcaaaagcaggacgacggccggggtctggtgcttcctggctacaagtacctcggacccttcaacggactcgacaaaggagagcccgtcaacgaggcggacgcggcggccctcgaacacgacaaggcttacgaccagcagctcaaggccggtgacaacccctacctgcggtacaaccacgccgacgccgagttccaggagcggctgcaagaagatacgtcttttgggggcaacctcgggcgagcagtcttccaggccaagaagaggcttcttgaacctcttggtctggttgaggaagcggctaagacggctcctggaaagaagaggcctgtagagcagtctcctcaggaaccggactcctccgcgggtattggcaaatcaggtgcacagcccgctaaaaagagactcaattttggtcagactggcgactcagagtcagtccccgacccacaacctctcggagaacctccagcaacccccgctgctgtgggacctactacaatggcttcaggcggtggcgcaccaatggcagacaataacgaaggcgccgatggagtgggtaatgcctcaggaaattggcattgcgattccacatggctgggcgacagagtcatcaccaccagcacccgaacctgggccctgcccacctataacaaccatctctacaagcaaatctccagtgcttcaacgggggccagtaacgacaaccactacttcggctacagcaccccctgggggtattttgactttaacagattccactgccacttctcaccacgtgactggcagcgactcatcaacaacaactggggattccggcccaagcgactcaacttcaagctcttcaacattcaggtcaaagaggttacggacaacgatggagtcaagaccatcgccaataaccttaccagcaccattcaggtgtttacggactcggaataccagctgccgtacgttctcggctccgcccaccagggctgcctgcctccgttcccggcggacgtgttcatgattccccagtacggctacctaacactcaacaacggtagtcaggccgtgggacgctcctccttctactgcctggaatactttccttcgcagatgctgagaactggcaacaacttccagtttacttacaccttcgaggacgtgcctttccacagcagctacgcccacagccagagcttggaccggctgatgaatcctctgattgaccagtacctgtactacttgtctcggactcaaacaacaggaggcacggcaaatacgcagactctgggcttcagccaaggtgggcctaatacaatggccaatcaggcaaagaactggctgccaggaccctgttaccgccaacaacgcgtctcaacgacaaccgggcaaaacaacaatagcaactttgcctggactgctgggaccaaataccatctgaatggaagaaattcattggctaatcctggcatcgctatggcaacacacaaagacgacaaggagcgtttttttcccagtaacgggatcctgatttttggcaaacaaaatgctgccagagacaatgcggattacagcgatgtcatgctcaccagcgaggaagaaatcaaaaccactaaccctgtggctacagaggaatacggtatcgtggcagataacttgcagcagcaaaacacggctcctcaaattggaactgtcaacagccagggggccttacccggtatggtctggcagaaccgggacgtgtacctgcagggtcccatctgggccaagattcctcacacggacggcaacttccacccgtctccgctgatgggcggctttggcctgaaacatcctccgcctcagatcctgatcaagaacacgcctgtacctgcggatcctccgaccaccttcaaccagtcaaagctgaactctttcatcacgcaatacagcaccggacaggtcagcgtggaaattgaatgggagctgcagaaggaaaacagcaagcgctggaaccccgagatccagtacacctccaactactacaaatctacaagtgtggactttgctgttaatacagaaggcgtgtactctgaaccccaccccattggcacccgttacctcacccgtcccctgtaa

SEQ ID NO: 3410 - DNA, 2211 bp, Artificial Sequence
  Synthetic polynucleotide
atggctgccgatggttatcttccagattggctcgaggacaacctctctgagggcattcgcgagtggtgggcgctgaaacctggagccccgaagcccaaagccaaccagcaaaagcaggacgacggccggggtctggtgcttcctggctacaagtacctcggacccttcaacggactcgacaagggggagcccgtcaacgcggcggatgcagcggccctcgagcacgacaaagcctacgaccagcagctcaaagcgggtgacaatccgtacctgcggtataaccacgccgacgccgagtttcaggagcgtctgcaagaagatacgtcttttgggggcaacctcgggcgagcagtcttccaggccaagaagagggttctcgaacctttgggtctggttgaggaaggggctaagacggctcctggaaagaaaaggccggtagagcagtctcctcaggaaccggactcctccgcgggtattggcaagacaggtgcacagcccgctaaaaagagactcaattttggtcagactggcgactcagagtcagtccccgacccacaacctctcggagaacctccagcaacccccgctgctgtgggacctactacaatggcttcaggcggtggcgcaccaatggcagacaataacgaaggcgccgacggagtgggtagtgcctcgggaaattggcattgcgattccacatggctgggcgacagagtcatcaccaccagcacccgaacctgggccctgcccacctataacaaccatctctacaagcaaatctccagtgcttcaacgggggccagtaacgacaaccactacttcggctacagcaccccctgggggtattttgacttcaacagattccactgccacttctcaccacgtgactggcagcgactcatcaacaacaactggggattccggcccaagcgactcaacttcaagctcttcaacattcaggtcaaagaggttacggacaacaatggagtcaagaccatcgccaataaccttaccagcacgatccaggtctttacggactcggagtaccagctgccgtacgtcctcggctctgcgcaccagggctgcctgcctccgttcccggcggacgtgttcatgattccgcagtacggctacctaacgctcaacaatggtagccaggcagtgggacggtcatccttttactgcctggaatatttcccatcgcagatgctgagaacgggcaacaactttaccttcagctacacctttgaggacgttcctttccacagcagctacgctcacagccagagtctggaccgtctcatgaatcctctgattgaccagtacctgtactacttgtctcggactcaaacaacaggaggcacggcaaatacgcagactctgggcttcagccaaggtgggcctaatacaatggccaatcaggcaaagaactggctgccaggaccctgttaccgccaacaacgcgtctcaacgacaaccgggcaaaacaacaatagcaactttgcctggactgctgggaccaaataccatctgaatggaagaaattcattggctaatcctggcatcgctatggcaacacacaaagacgacaaggagcgtttttttcccagtaacgggatcctgatttttggcaaacaaaatgctgccagagacaatgcggattacagcgatgtcatgctcaccagcgaggaagaaatcaaaaccactaaccctgtggctacagaggaatacggtatcgtggcagataacttgcagcagcaaaacacggctcctcaaattggaactgtcaacagccagggggccttacccggtatggtctggcagaaccgggacgtgtacctgcagggtcccatctgggccaagattcctcacacggacggcaacttccacccgtctccgctgatgggcggctttggcctgaaacatcctccgcctcagatcctgatcaagaacacgcctgtacctgcggatcctccgaccaccttcaaccagtcaaagctgaactctttcatcacgcaatacagcaccggacaggtcagcgtggaaattgaatgggagctgcagaaggaaaacagcaagcgctggaaccccgagatccagtacacctccaactactacaaatctacaagtgtggactttgctgttaatacagaaggcgtgtactctgaaccccaccccattggcacccgttacctcacccgtcccctgtaa

SEQ ID NO: 3411 - DNA, 2211 bp, Artificial Sequence
  Synthetic polynucleotide
atggctgccgatggttatcttccagattggctcgaggacaacctctctgagggcattcgcgagtggtgggacttgaaacctggagccccgaagcccaaagccaaccagcaaaagcaggacgacggccggggtctggtgcttcctggctacaagtacctcggacccttcaacggactcgacaagggggagcccgtcaacgcggcggacgcagcggccctcgagcacgacaaggcctacgaccagcagctcaaagcgggtgacaatccgtacctgcggtataaccacgccgacgccgagtttcaggagcgtctgcaagaagatacgtcttttgggggcaacctcggacgagcagtcttccaggccaaaaagaggcttcttgaacctcttggtctggttgaggaagcggctaagacggctcctggaaagaagaggcctgtagagcagtctcctcaggaaccggactcctccgcgggtattggcaaatcgggtgcacagcccgctaaaaagagactcaatttcggtcagactggcgacacagagtcagtcccagaccctcaaccaatcggagaacctccagcagcgccctctggtgtgggacctaatacaatggctgcaggcggtggcgcaccaatggcagacaataacgaaggtgccgatggagtgggtagttcctcgggaaattggcattgcgattcccaatggctgggggacagagtcatcaccaccagcacccgaacctgggccctgcccacctataacaaccacctctacaagcaaatctccagtgcttcaacgggggccagcaacgacaaccactactttggctacagcaccccttgggggtattttgacttcaacagattccactgccacttttcaccacgtgactggcaaagactcatcaacaacaactggggattccgacccaagagactcaacttcaagctcttcaacatccaggtcaaggaggtcacgcagaatgaaggcaccaagaccatcgccaataacctcaccagcaccatccaggtgtttacggactcggagtaccagctgccgtacgttctcggctctgcccaccagggctgcctgcctccgttcccggcggacgtgttcatgattccccagtacggctacctaacactcaacaacggtagtcaggccgtgggacgctcctccttctactgcctggaatactttccttcgcagatgctgagaaccggcaacaacttccagtttacttacaccttcgaggacgtgcctttccacagcagctacgcgcacagccagagcttggaccggctgatgaatcctctgattgaccagtacctgtactacttgtctcggactcaaacaacaggaggcacggcaaatacgcagactctgggcttcagccaaggtgggcctaatacaatggccaatcacgcaaagaactggctgccaggaccctgttaccgccaacaacgcgtctcaacgacaaccgggcaaaacaacaatagcaactttgcctggactgctgggaccaaataccatctgaatggaagaaattcattggctaatcctggcatcgctatggcaacacacaaagacgacaaggagcgtttttttcccagtaacgggatcctgatttttggcaaacaaaatgctgccagagacaatgcggattacagcgatgtcatgctcaccagcgaggaagaaatcaaaaccactaaccctgtggctacagaggaatacggtatcgtggcagataacttgcagcagcaaaacacggctcctcaaattggaactgtcaacagccagggggccttacccggtatggtctggcagaaccgggacgtgtacctgcagggtcccatctgggccaagattcctcacacggacggcaacttccacccgtctccgctgatgggcggctttggcctgaaacatcctccgcctcagatcctgatcaagaacacgcctgtacctgcggatcctccgaccaccttcaaccagtcaaagctgaactctttcatcacgcaatacagcaccggacaggtcagcgtggaaattgaatgggagctgcagaaggaaaacagcaagcgctggaaccccgagatccagtacacctccaactactacaaatctacaagtgtggactttgctgttaatacagaaggcgtgtactctgaaccccaccccattggcacccgttacctcacccgtcccctgtaa

SEQ ID NO: 3412 - DNA, 2214 bp, Artificial Sequence
  Synthetic polynucleotide
atggctgccgatggttatcttccagattggctcgaggacaaccttagtgaaggaattcgcgagtggtgggcgctgaaacctggagccccgaagcccaaagccaaccagcaaaagcaggacgacggccggggtctggtgcttcctggctacaagtacctcggacccttcaacggactcgacaagggggagcccgtcaacgcggcggacgcagcggccctcgagcacgacaaggcctacgaccagcagctcaaagcgggtgacaatccgtacctgcggtataaccacgccgacgccgagtttcaggagcgtctgcaagaagatacgtcttttgggggcaacctcgggcgagcagtcttccaggccaagaagcgggttctcgaacctctcggtctggttgaggaaggcgctaagacggctcctggaaagaaacgtccggtagagcagtcgccacaagagccagactcctcctcgggcatcggcaagacaggccagcagcccgctaaaaagagactcaatttcggtcagactggcgacacagagtcagtcccagaccctcaaccaatcggagaacctcccgcagccccctcaggtgtgggatctcttacaatggcttcaggtggtggcgcaccagtggcagacaataacgaaggtgccgatggagtgggtagttcctcgggaaattggcattgcgattcccaatggctgggggacagagtcatcaccaccagcaccagaacctgggccttgcccacctacaataaccacctctacaagcaaatctccaacagcacatctggaggatcttcaaatgacaacgcctacttcggctacagcaccccctgggggtattttgactttaacagattccactgccacttttcaccacgtgactggcagcgactcatcaacaacaactggggattccgacccaagagactcaacttcaagctcttcaacatccaggtcaaggaggtcacgcagaacgaaggcaccaagaccatcgccaataacctcaccagcaccatccaggtgtttacggactcggagtaccagctgccgtacgttctcggctccgcccaccagggctgcctgcctccgttcccggcggacgtgttcatgattccccagtacggctacctaacgctcaacaacggtagtcaggccgtgggacgctcctccttctactgcctggaatactttccttcgcagatgctgagaaccggcaacaacttccagtttacttacaccttcgaggacgtgcctttccacagcagctacgcgcacagccagagcttggaccggctgatgaatcctctgattgaccagtacctgtactacttgtctcggactcaaacaacaggaggcacggcaaatacgcagactctgggcttcagccaaggtgggcctaatacaatggccaatcaggcaaagaactggctgccaggaccctgttaccgccaacaacgcgtctcaacgacaaccgggcaaaacaacaatagcaactttgcctggactgctgggaccaaataccatctgaatggaagaaattcattggctaatcctggcatcgctatggcaacacacaaagacgacaaggagcgtttttttcccagtaacgggatcctgatttttggcaaacaaaatgctgccagagacaatgcggattacagcgatgtcatgctcaccagcgaggaagaaatcaaaaccactaaccctgtggctacagaggaatacggtatcgtggcagataacttgcagcagcaaaacacggctcctcaaattggaactgtcaacagccagggggccttacccggtatggtctggcagaaccgggacgtgtacctgcagggtcccatctgggccaagattcctcacacggacggcaacttccacccgtctccgctgatgggcggctttggcctgaaacatcctccgcctcagatcctgatcaagaacacgcctgtacctgcggatcctccgaccaccttcaaccagtcaaagctgaactctttcatcacgcaatacagcaccggacaggtcagcgtggaaattgaatgggagctgcagaaggaaaacagcaagcgctggaaccccgagatccagtacacctccaactactacaaatctacaagtgtggactttgctgttaatacagaaggcgtgtactctgaaccccaccccattggcacccgttacctcacccgtcccctgtaa

SEQ ID NO: 3413 - DNA, 2214 bp, Artificial Sequence
  Synthetic polynucleotide
atggctgccgatggttatcttccagattggctcgaggacaaccttagtgaaggaattcgcgagtggtgggcgctgaaacctggagccccgaagcccaaagccaaccagcaaaagcaggacgacggccggggtctggtgcttcctggctacaagtacctcggacccttcaacggactcgacaagggggagcccgtcaacgcggcggacgcagcggccctcgagcacgacaaggcctacgaccagcagctcaaagcgggtgacaatccgtacctgcggtataaccacgccgacgcggagtttcaggagcgccttaaagaagatacgtcttttgggggcaacctcgggcgagcagtcttccaggccaagaagagggttctcgaaccttttggtctggttgaggaaggtgctaagacggctcctggaaagaaacgtccggtagagcagtcgccacaagagccagactcctcctcgggcatcggcaagacaggccagcagcccgctaaaaagagactcaattttggtcagactggcgactcagagtcagttccagaccctcaacctctcggagaacctccagcagcgccctctggtgtgggacctaatacaatggctgcaggcggtggcgcaccaatggcagacaataacgaaggtgccgatggagtgggtagttcctcgggaaattggcattgcgattcccaatggctggggaacagagtcatcaccaccagcacccgaacctgggccctgcccacctacaacaatcacctctacaagcaaatctccaacagcacatctggaggatcttcaaatgacaacgcctacttcggctacagcaccccctgggggtattttgacttcaacagattccactgccacttctcaccacgtgactggcagcgactcatcaacaacaactggggattccggcccaagagactcaacttcaagctcttcaacattcaggtcaaagaggttacggacaacaatggagtcaagaccatcgccaataaccttaccagcacggtccaggtcttcacggactcggagtaccagttgccgtacgtcctcggctctgcgcaccagggctgcctccctccgttcccggcggacgtgttcatgattccgcaatacggctacctgacgctcaacaacggtagccaagccgtgggacgttcatccttttactgcctggaatatttcccttctcagatgctgagaaccggcaacaacttccagtttacttacaccttcgaggacgtgcctttccacagcagctacgcgcacagccagagcttggaccggctgatgaatcctctgattgaccagtacctgtactacttgtctcggactcaaacaacaggaggcacggcaaatacgcagactctgggcttcagccaaggtgggcctaatacaatggccaatcaggcaaagaactggctgccaggaccctgttaccgccaacaacgcgtctcaacgacaaccgggcaaaacaacaatagcaactttgcctggactgctgggaccaaataccatctgaatggaagaaattcattggctaatcctggcatcgctatggcaacacacaaagacgacaaggagcgtttttttcccagtaacgggatcctgatttttggcaaacaaaatgctgccagagacaatgcggattacagcgatgtcatgctcaccagcgaggaagaaatcaaaaccactaaccctgtggctacagaggaatacggtatcgtggcagataacttgcagcagcaaaacacggctcctcaaattggaactgtcaacagccagggggccttacccggtatggtctggcagaaccgggacgtgtacctgcagggtcccatctgggccaagattcctcacacggacggcaacttccacccgtctccgctgatgggcggctttggcctgaaacatcctccgcctcagatcctgatcaagaacacgcctgtacctgcggatcctccgaccaccttcaaccagtcaaagctgaactctttcatcacgcaatacagcaccggacaggtcagcgtggaaattgaatgggagctgcagaaggaaaacagcaagcgctggaaccccgagatccagtacacctccaactactacaaatctacaagtgtggactttgctgttaatacagaaggcgtgtactctgaaccccaccccattggcacccgttacctcacccgtcccctgtaa

SEQ ID NO: 3414 - DNA, 2211 bp, Artificial Sequence
  Synthetic polynucleotide
atggctgccgatggttatcttccagattggctcgaggacaacctctctgagggcattcgcgagtggtgggacttgaaacctggagccccgaagcccaaagccaaccagcaaaagcaggacgacggccggggtctggtgcttcctggctacaagtacctcggacccttcaacggactcgacaggggggagcccgtcaacgcggcggacgcagcggccctcgagcacgacaaggcctacgaccagcagctcaaagcgggtgacaatccgtacctgcggtataaccacgccgacgccgagtttcaggagcgtctgcaagaagatacgtcttttgggggcaacctcgggcgagcagtcttccaggccaagaagcgggttctcgaacctctcggtctggttgaggaaggcgctaagacggctcctggaaagaaacgtccggtagagcagtcgccacaagagccagactcctcctcgggcatcggcaagacaggccagcagcccgctaaaaagagactcaattttggtcagactggcgactcagagtcagtccccgacccacaacctctcggagaacctccagcaacccccgctgctgtgggacctactacaatggcttcaggcggtggcgcaccaatggcagacaataacgaaggcgccgacggagtgggtaatgcctcaggaaattggcattgcgattccacatggctgggcgacagagtcatcaccaccagcacccgaacctgggccttgcccacctataacaaccacctctacaagcaaatctccagtgcttcaacgggggccagcaacgacaaccactacttcggctacagcaccccctgggggtattttgacttcaacagattccactgccacttctcaccacgtgactggcagcgactcatcaacaacaactggggattccggcctaagcgactcaacttcaagctcttcaacattcaggtcaaagaggttacggacaacaatggagtcaagaccatcgccaataacctcaccagcaccatccaggtgtttacggactcggagtaccagctgccgtacgttctcggctctgcccaccagggctgcctgcctccgttcccggcggacgtgttcatgattccccagtacggctacctaacactcaacaacggtagtcaggccgtgggacgctcctccttctactgcctggaatactttccttcgcagatgctgagaaccggcaacaacttccagtttacttacaccttcgaggacgtgcctttccacagcagctacgcccacagccagagcttggaccggctgatgaatcctctgattgaccagtacctgtactacttgtctcggactcaaacaacaggaggcacggcaaatacgcagactctgggcttcagccaaggtgggcctaatacaatggccaatcaggcaaagaactggctgccaggaccctgttaccgccaacaacgcgtctcaacgacaaccgggcaaaacaacaatagcaactttgcctggactgctgggaccaaataccatctgaatggaagaaattcattggctaatcctggcatcgctatggcaacacacaaagacgacaaggagcgtttttttcccagtaacgggatcctgatttttggcaaacaaaatgctgccagagacaatgcggattacagcgatgtcatgctcaccagcgaggaagaaatcaaaaccactaaccctgtggctacagaggaatacggtatcgtggcagataacttgcagcagcaaaacacggctcctcaaattggaactgtcaacagccagggggccttacccggtatggtctggcagaaccgggacgtgtacctgcagggtcccatctgggccaagattcctcacacggacggcaacttccacccgtctccgctgatgggcggctttggcctgaaacatcctccgcctcagatcctgatcaagaacacgcctgtacctgcggatcctccgaccaccttcaaccagtcaaagctgaactctttcatcacgcaatacagcaccggacaggtcagcgtggaaattgaatgggagctgcagaaggaaaacagcaagcgctggaaccccgagatccagtacacctccaactactacaaatctacaagtgtggactttgctgttaatacagaaggcgtgtactctgaaccccaccccattggcacccgttacctcacccgtcccctgtaa

SEQ ID NO: 3415 - DNA, 2211 bp, Artificial Sequence
  Synthetic polynucleotide
atggctgccgatggttatcttccagattggctcgaggacaacctctctgagggcattcgcgagtggtgggacttgaaacctggagccccgaagcccaaagccaaccagcaaaagcaggacgacggccggggtctggtgcttcctggctacaagtacctcggacccttcaacggactcgacaagggggagcccgtcaacgcggcggacgcagcggccctcgagcacgacaaggcctacgaccagcagctcaaagcgggtgacaatccgtacctgcggtataaccacgccgacgccgagtttcaggagcgtctgcaagaagatacgtcttttgggggcaacctcgggcgagcagtcttccaggccaagaagcgggttctcgaacctctcggtctggttgaggaaggcgctaagacggctcctggaaagaaacgtccggtagagcagtcgccacaagagccagactcctcctcgggcatcggcaagaaaggccaacagcccgccagaaaaagactcaattttggtcagactggcgactcagagtcagttccagaccctcaacctctcggagaacctcccgcagccccctcaggtgtgggatctcttacaatggcttcaggcggtggcgcaccaatggcagacaataacgaaggcgccgacggagtgggtaatgcctcaggaaattggcattgcgattccacatggctgggcgacagagtcatcaccaccagcacccgaacatgggccttgcccacttacaacaaccatctctacaagcaaatctccagtgcttcaacgggggccagcaacgacaaccactacttcggctacagcaccccctgggggtattttgatttcaacagattccactgccacttttcaccacgtgactggcaaagactcatcaacaacaactggggattccgacccaagagactcaacttcaagctctttaacattcaagtcaaagaggtcacgcagaatgaaggcaccaagaccatcgccaataaccttaccagcacggtccaggtcttcacggactcagactatcagctcccgtacgttctcggctccgcccaccagggctgcctgcctccgttcccggcggacgtgttcatgattccccagtacggctacctaacactcaacaacggtagtcaggccgtgggacgctcctccttctactgcctggaatactttccttcgcagatgctgagaaccggcaacaacttccagtttacttacacctttgaggacgttcctttccacagcagctacgctcacagccagagtctggaccgtctcatgaatcctctgattgaccagtacctgtactacttgtctcggactcaaacaacaggaggcacggcaaatacgcagactctgggcttcagccaaggtgggcctaatacaatggccaatcaggcaaagaactggctgccaggaccctgttaccgccaacaacgcgtctcaacgacaaccgggcaaaacaacaatagcaactttgcctggactgctggaaccaaataccatctgaatggaagaaattcattgtctaatcctggcatcgctatggcgacacacaaagacgacaaggagcgtttttttcccagtaacgggatcctgatttttggcaaacaaaatgctgccagagacaatgcggattacagcgatgtcatgctcaccagcgaggaagaaatcaaaaccactaaccctgtggctacagaggaatacggtatcgtggcagataacttgcagcagcaaaacacggctcctcaaattggaactgtcaacagccagggggccttacccggtatggtctggcagaaccgggacatgtacctgcagggtcccatctgggccaagattcctcacacggacggcaacttccacccgtctccgctgatgggcggctttggcctgaaacatcctccgcctcagatcctgatcaagaacacgcctgtacctgcggatcctccgaccaccttcaaccagtcaaagctgaactctttcatcacgcaatacagcaccggacaggtcagcgtggaaattgaatgggagctgcagaaggaaaacagcaagcgctggaaccccgagatccagtacacctccaactactacaaatctacaagtgtggactttgctgttaatacagaaggcgtgtactctgaaccccaccccattggcacccgttacctcacccgtcccctgtaa

SEQ ID NO: 3416 - DNA, 2211 bp, Artificial Sequence
  Synthetic polynucleotide
atggctgccgatggttatcttccagattggctcgaggacaacctctctgagggcattcgcgagtggtgggcgctgaaacctggagccccgaagcccaaagccaaccagcaaaagcaggacgacggccggggtctggtgcttcctggctacaagtacctcggacccttcaacggactcgacaagggggagcccgtcaacgcggcggatgcagcggccctcgagcacgacaaggcctacgaccagcagctcaaagcgggtgacaatccgtacctgcggtataaccacgccgacgccgagtttcaggagcgtctgcaggaagatacgtcttttgggggcaacctcgggcgagcagtcttccaggccaagaagagggttctcgaaccttttggtctggttgaggaaggcgctaagacggctcctggaaagaaacgtccggtagagcagtcgccacaagagccagactcctcctcgggcatcggcaagacaggccagcagcccgctaaaaagagactcaattttggtcagactggcggctcagagtcagtccccgacccacaacctctcggagaacctccagcaacccccgctgctgtgggacctactacaatggctgcaggcggtggcgcaccaatggcagacaataacgaaggcgccgacggagtgggtagttcctcgggaaattggcattgcgattccacatggctgggcgacagagtcatcaccaccagcaccagaacctgggccttgcccacctataacaaccacctctacaagcaaatctccagtgcttcaacgggggccagcaacgacaaccactacttcggctacagcaccccctgggggtattttgatttcaacagattccactgccatttctcaccacgtgactggcagcgactcatcaacaacaactggggattccggcccaagagactcaacttcaaactcttcaacattcaggtcaaagaggttacggacaacaatggagtcaagaccatcgccaataaccttaccagcacggtccaggtgtttacggactcggagtaccagctgccgtacgttctcggctctgcccaccagggctgcctccctccgttcccggcggacgtgttcatgattccgcagtacggctacctaacgctcaacaatggcagccaggcagtgggacggtcatccttttactgcctggaatatttcccttctcagatgctgagaacgggcaacaactttaccttcagctacacctttgaggaagtgcctttccacagcagctacgcgcacagccagagcctggaccggctgatgaatcctctgattgaccagtacctgtactacttgtctcggactcaaacaacaggaggcacggcaaatacgcagactctgggcttcagccaaggtgggcctaatacaatggccaatcaggcaaagaactggctgccaggaccctgttaccgccaacaacgcgtctcaacgacaaccgggcaaaacaacaatagcaactttgcctggactgctgggaccaaataccatctgaatggaagaaattcattggctaatcctggcatcgctatggcctcacacaaagacgacaaggagcgtttttttcccagtaacgggatcctgatttttggcaaacaaaatgctgccagagacaatgcggattacagcgatgtcatgctcaccagcgaggaagaaatcaaaaccactaaccctgtggctacagaggaatacggtatcgtggcagataacttgcagcagcaaaacacggctcctcaaattggaactgtcaacagccagggggccttacccggtatggtctggcagaaccgggacgtgtacctgcagggtcccatctgggccaagattcctcacacggacggcaacttccacccgtctccgctgatgggcggctttggcctgaaacatcctccgcctcagatcctgatcaagaacacgcctgtacctgcggatcctccgaccaccttcaaccagtcaaagctgaactctttcatcacgcaatacagcaccggacaggtcagcgtggaaattgaatgggagctgcagaaggaaaacagcaagcgctggaaccccgagatccagtacacctccaactactacaaatctacaagtgtggactttgctgttaatacagaaggcgtgtactctgaaccccaccccattggcacccgttacctcacccgtcccctgtaa

SEQ ID NO: 3417 - protein, 736 aa, Artificial Sequence
  Synthetic polypeptide
MAADGYLPDWLEDTLSEGIRQWWKLKPGPPPPKPAERHKDDSRGLVLPGYKYLGPFNGLDKGEPVNEADAAALEHDKAYDQQLKAGDNPYLKYNHADAEFQERLKEDTSFGGNLGRAVFQAKKRVLEPLGLVEEGAKTAPGKKRPVEQSPQEPDSSSGIGKTGQQPAKKRLNFGQTGDSESVPDPQPLGEPPATPAAVGPTTMASGGGAPMADNNEGADGVGSSSGNWHCDSQWLGDRVITTSTRTWALPTYNNHLYKQISSASTGASNDNHYFGYSTPWGYFDFNRFHCHFSPRDWQRLINNNWGFRPKRLNFKLFNIQVKEVTQNEGTKTIANNLTSTIQVFTDSEYQLPYVLGSAHQGCLPPFPADVFMIPQYGYLTLNNGSQAVGRSSFYCLEYFPSQMLRTGNNFQFTYTFEDVPFHSSYAHSQSLDRLMNPLIDQYLYYLSRTQTTGGTANTQTLGFSQGGPNTMANQAKNWLPGPCYRQQRVSTTTGQNNNSNFAWTAGTKYHLNGRNSLANPGIAMATHKDDKERFFPSNGILIFGKQNAARDNADYSDVMLTSEEEIKTTNPVATEEYGIVADNLQQQNTAPQIGTVNSQGALPGMVWQNRDVYLQGPIWAKIPHTDGNFHPSPLMGGFGLKHPPPQILIKNTPVPADPPTTFNQSKLNSFITQYSTGQVSVEIEWELQKENSKRWNPEIQYTSNYYKSTSVDFAVNTEGVYSEPHPIGTRYLTRPL

SEQ ID NO: 3418 - protein, 736 aa, Artificial Sequence
  Synthetic polypeptide
MAADGYLPDWLEDNLSEGIREWWALKPGAPKPKANQQKQDDGRGLVLPGYKYLGPFNGLDKGEPVNAADAAALEHDKAYDQQLKAGDNPYLKYNHADAEFQERLKEDTSFGGNLGRAVFQAKKRLLEPLGLVEEAAKTAPGKKRPVEQSPQEPDSSAGIGKSGAQPAKKRLNFGQTGDSESVPDPQPLGEPPATPAAVGPTTMASGGGAPMADNNEGADGVGNASGNWHCDSTWLGDRVITTSTRTWALPTYNNHLYKQISSASTGASNDNHYFGYSTPWGYFDFNRFHCHFSPRDWQRLINNNWGFRPKRLNFKLFNIQVKEVTQNEGTKTIANNLTSTIQVFTDSEYQLPYVLGSAHQGCLPPFPADVFMIPQYGYLTLNNGSQAVGRSSFYCLEYFPSQMLRTGNNFQFTYTFEDVPFHSSYAHSQSLDRLMNPLIDQYLYYLSRTQTTGGTANTQTLGFSQGGPNTMANQAKNWLPGPCYRQQRVSTTTGQNNNSNFAWTAGTKYHLNGRNSLANPGIAMATHKDDKERFFPSNGILIFGKQNAARDNADYSDVMLTSEEEIKATNPVATEEYGIVADNLQQQNTAPQIGTVNSQGALPGMVWQNRDVYLQGPIWAKIPHTDGNFHPSPLMGGFGLKHPPPQILIKNTPVPADPPTTFNQSKLNSFITQYSTGQVSVEIEWELQKENSKRWNPEIQYTSNYYKSTSVDFAVNTEGVYSEPHPIGTRYLTRPL

SEQ ID NO: 3419 - protein, 737 aa, Artificial Sequence
  Synthetic polypeptide
MAADGYLPDWLEDNLSEGIREWWDLKPGAPKPKANQQKQDDGRGLVLPGYKYLGPFNGLDKGEPVNAADAAALEHDKAYDQQLKAGDNPYLRYNHADAEFQERLQEDTSFGGNLGRAVFQAKKRVLEPLGLVEEGANTAPGKKRPVEQSPQEPDSSAGIGKSGAQPAKKRLNFGQTGDTESVPDPQPIGEPPAAPSGVGSLTMASGGGAPVADNNEGADGVGSSSGNWHCDSQWLGDRVITTSTRTWALPTYNNHLYKQISNSTSGGSSNDNAYFGYSTPWGYFDFNRFHCHFSPRDWQRLINNNWGFRPKRLNFKLFNIQVKEVTDNNGVKTIANNLTSTIQVFTDSEYQLPYVLGSAHQGCLPPFPADVFMIPQYGYLTLNNGSQAVGRSSFYCLEYFPSQMLRTGNNFQFTYTFEDVPFHSSYAHSQSLDRLMNPLIDQYLYYLSRTQTTGGTANTQTLGFSQGGPNTMANQAKNWLPGPCYRQQRVSTTTGQNNNSNFAWTAGTKYHLNGRNSLANPGIAMASHKDDKERFFPSNGILIFGKQNAARDNADYSDVMLTSEEEIKTTNPVATEEYGIVADNLQQQNTAPQIGTVNSQGALPGMVWQNRDVYLQGPIWAKIPHTDGNFHPSPLMGGFGLKHPPPQILIKNTPVPADPPTTFNQSKLNSFITQYSTGQVSVEIEWELQKENSKRWNPEIQYTTNYYKSTSVDFAVNTEGVYSEPHPIGTRYLTRPL

SEQ ID NO: 3420 - protein, 736 aa, Artificial Sequence
  Synthetic polypeptide
MAADGYLPDWLEDNLSEGIREWWALKPGAPKPKANQQKQDDGRGLVLPGYKYLGPFNGLDKGEPVNEADAAALEHDKAYDQQLKAGDNPYLRYNHADAEFQERLQEDTSFGGNLGRAVFQAKKRVLEPLGLVEEGAKTAPGKKRPVEQSPQEPDSSSGIGKTGQQPAKKRLNFGQTGDSESVPDPQPLGEPPATPAAVGPTTMASGGGAPMADNNEGADGVGNASGNWHCDSTWLGDRVITTSTRTWALPTYNNHLYKQISSASTGASNDNHYFGYSTPWGYFDFNRFHCHFSPRDWQRLINNNWGFRPKRLNFKLFNIQVKEVTQNEGTKTIANNLTSTIQVFTDSEYQLPYVLGSAHQGCLPPFPADVFMIPQYGYLTLNNGSQAVGRSSFYCLEYFPSQMLRTGNNFQFTYTFEDVPFHSSYAHSQSLDRLMNPLIDQYLYYLSRTQTTGGTANTQTLGFSQGGPNTMANQAKNWLPGPCYRQQRVSTTTGQNNNSNFAWTAGTKYHLNGRNSLANPGIAMATHKDDKERFFPSNGILIFGKQNAARDNADYSDVMLTSEEEIKTTNPVATEEYGIVADNLQQQNTAPQIGTVNSQGALPGMVWQNRDVYLQGPIWAKIPHTDGNFHPSPLMGGFGLKHPPPQILIKNTPVPADPPTTFNQSKLNSFITQYSTGQVSVEIEWELQKENSKRWNPEIQYTSNYYKSTSVDFAVNTEGVYSEPHPIGTRYLTRPL

SEQ ID NO: 3421 - protein, 736 aa, Artificial Sequence
  Synthetic polypeptide
MAADGYLPDWLEDNLSEGIREWWALKPGAPKPKANQQKQDDGRGLVLPGYKYLGPFNGLDKGEPVNEADAAALEHDKAYDQQLKAGDNPYLRYNHADAEFQERLQEDTSFGGNLGRAVFQAKKRVLEPFGLVEEGAKTAPGKKRPVEQSPQEPDSSSGIGKTGQQPAKKRLNFGQTGDSESVPDPQPLGEPPATPAAVGPTTMASGGGAPMADNNEGADGVGNASGNWHCDSQWLGDRVITTSTRTWALPTYNNHLYKQISSASTGASNDNHYFGYSTPWGYFDFNRFHCHFSPRDWQRLINNNWGFRPKRLNFKLFNIQVKEVTDNNGVKTIANNLTSTVQVFSDSEYQLPYVLGSAHQGCLPPFPADVFMIPQYGYLTLNNGSQAVGRSSFYCLEYFPSQMLRTGNNFQFTYTFEDVPFHSSYAHSQSLDRLMNPLIDQYLYYLSRTQTTGGTANTQTLGFSQGGPNTMANQAKNWLPGPCYRQQRVSTTTGQNNNSNFAWTAGTKYHLNGRNSLANPGIAMATHKDDKERFFPSNGILIFGKQNAARDNADYSDVMLTSEEEIKTTNPVATEEYGIVADNLQQQNTAPQIGTVNSQGALPGMVWQNRDVYLQGPIWAKIPHTDGNFHPSPLMGGFGLKHPPPQILIKNTPVPADPPTTFNQSKLNSFITQYSTGQVSVEIEWELQKENSKRWNPEIQYTSNYYKSTSVDFAVNTEGVYSEPHPIGTRYLTRPL

SEQ ID NO: 3422 - protein, 736 aa, Artificial Sequence
  Synthetic polypeptide
MAADGYLPDWLEDTLSEGIRQWWKLKPGPPPPKPAERHKDDSRGLVLPGYKYLGPFNGLDKGEPVNEADAAALEHDKAYDRQLDSGDNPYLKYNHADAEFQERLKEDTSFGGNLGRAVFQAKKRVLEPFGLVEEGAKTAPGKKRPVEQSPQEPDSSSGIGKTGQQPAKKRLNFGQTGDSESVPDPQPLGEPPATPAAVGPTTMASGGGAPMADNNEGADGVGNASGNWHCDSTWLGDRVITTSTRTWALPTYNNHLYKQISSASTGASNDNHYFGYSTPWGYFDFNRFHCHFSPRDWQRLINNNWGFRPKRLNFKLFNIQVKEVTDNNGVKTIANNLTSTVQVFTDSDYQLPYVLGSAHEGCLPPFPADVFMIPQYGYLTLNNGSQAVGRSSFYCLEYFPSQMLRTGNNFQFTYTFEDVPFHSSYAHSQSLDRLMNPLIDQYLYYLSRTQTTGGTANTQTLGFSQGGPNTMANQAKNWLPGPCYRQQRVSTTTGQNNNSNFAWTAGTKYHLNGRNSLANPGIAMATHKDDKERFFPSNGILIFGKQNAARDNADYSDVMLTSEEEIKTTNPVATEEYGIVADNLQQQNTAPQIGTVNSQGALPGMVWQNRDVYLQGPIWAKIPHTDGNFHPSPLMGGFGLKHPPPQILIKNTPVPADPPTTFNQSKLNSFITQYSTGQVSVEIEWELQKENSKRWNPEIQYTSNYYKSTSVDFAVNTEGVYSEPHPIGTRYLTRNL

SEQ ID NO: 3423 - protein, 738 aa, Artificial Sequence
  Synthetic polypeptide
MAADGYLPDWLEDNLSEGIREWWDLKPGAPKPKANQQKQDDGRGLVLPGYKYLGPFNGLDKGEPVNAADAAALEHDKAYDQQLQAGDNPYLRYNHADAEFQERLQEDTSFGGNLGRAVFQAKKRVLEPLGLVEEGAKTAPGKKRPVEPSPQRSPDSSTGIGKKGQQPARKRLNFGQTGDSESVPDPQPLGEPPAAPSGVGPNTMAAGGGAPMADNNEGADGVGSSSGNWHCDSQWLGDRVITTSTRTWALPTYNNHLYKQISNSTSGGSSNDNAYFGYSTPWGYFDFNRFHCHFSPRDWQRLINNNWGFRPKRLSFKLFNIQVKEVTQNEGTKTIANNLTSTIQVFTDSEYQLPYVLGSAHQGCLPPFPADVFMIPQYGYLTLNNGSQAVGRSSFYCLEYFPSQMLRTGNNFTFSYTFEDVPFHSSYAHSQSLDRLMNPLIDQYLYYLSRTQTTGGTANTQTLGFSQGGPNTMANQAKNWLPGPCYRQQRVSTTTGQNNNSNFAWTAGTKYHLNGRNSLANPGIAMATHKDDKERFFPSNGILIFGKQNAARDNADYSDVMLTSEEEIKTTNPVATEEYGIVADNLQQQNTAPQIGTVNSQGALPGMVWQNRDVYLQGPIWAKIPHTDGNFHPSPLMGGFGLKHPPPQILIKNTPVPADPPTTFNQSKLNSFITQYSTGQVSVEIEWELQKENSKRWNPEIQYTSNYYKSTSVDFAVNTEGVYSEPHPIGTRYLTRPL

SEQ ID NO: 3424 - protein, 737 aa, Artificial Sequence
  Synthetic polypeptide
MAADGYLPDWLEDNLSEGIREWWDLKPGAPKPKANQQKQDDGRGLVLPGYKYLGPFNGLDKGEPVNAADAAALEHDKAYDQQLKAGDNPYLRYNHADAEFQERLQEDTSFGGNLGRAVFQAKKRVLEPFGLVEEGAKTAPGKKRPVEQSPQEPDSSSGIGKTGQQPAKKRLNFGQTGDSESVPDPQPLGEPPATPAAVGPTTMASGGGAPMQDNNEGADGVGSSSGNWHCDSTWLGDRVITTSTRTWALPTYNNHLYKQISNGTSGGATNDNTYFGYSTPWGYFDFNRFHCHFSPRDWQRLINNNWGFRPKRLNFKLFNIQVKEVTQNEGTKTIANNLTSTIQVFTDSEYQLPYVLGSAHQGCLPPFPADVFMIPQYGYLTLNNGSQAVGRSSFYCLEYFPSQMLRTGNNFTFSYTFEDVPFHSSYAHSQSLDRLMNPLIDQYLYYLSRTQTTGGTANTQTLGFSQGGPNTMANQAKNWLPGPCYRQQRVSTTTGQNNNSNFAWTAGTKYHLNGRNSLANPGIAMATHKDDKERFFPSNGILIFGKQNAARDNADYSDVMLTSEEEIKTTNPVATEEYGIVADNLQQQNTAPQIGTVNSQGALPGMVWQNRDVYLQGPIWAKIPHTDGNFHPSPLMGGFGLKHPPPQILIKNTPVPADPPTTFNQSKLNSFITQYSTGQVSVEIEWELQKENSKRWNPEIQYTSNYYKSTSVDFAVNTEGVYSEPHPIGTRYLTRPL

SEQ ID NO: 3425 - protein, 736 aa, Artificial Sequence
  Synthetic polypeptide
MAADGYLPDWLEDNLSEGIREWWALKPGAPKPKANQQKQDDGRGLVLPGYKYLGPFNGLDKGEPVNAADAAALEHDKAYDQQLKAGDNPYLRYNHADAEFQERLQEDTSFGGNLGRAVFQAKKRVLEPLGLVEEGAKTAPGKKRPVEQSPQEPDSSSGIGKTGQQPAKKRLNFGQTGDSESVPDPQPLGEPPATPAAVGPTTMASGGGAPMADNNEGADGVGSSSGNWHCDSTWLGDRVITTSTRTWALPTYNNHLYKQISSASTGASNDNHYFGYSTPWGYFDFNRFHCHFSPRDWQRLINNNWGFRPKRLNFKLFNIQVKEVTDNNGVKTIANNLTSTVQVFTDSDYQLPYVLGSAHEGCLPPFPADVFMIPQYGYLTLNNGSQAVGRSSFYCLEYFPSQMLRTGNNFTFSYTFEDVPFHSSYAHSQSLDRLMNPLIDQYLYYLSRTQTTGGTANTQTLGFSQGGPNTMANQAKNWLPGPCYRQQRVSTTTGQNNNSNFAWTAGTKYHLNGRNSLANPGIAMATHKDDKERFFPSNGILIFGKQNAARDNADYSDVMLTSEEEIKTTNPVATEEYGIVADNLQQQNTAPQIGTVNSQGALPGMVWQNRDVYLQGPIWAKIPHTDGNFHPSPLMGGFGLKHPPPQILIKNTPVPADPPTTFNQSKLNSFITQYSTGQVSVEIEWELQKENSKRWNPEIQYTSNYYKSTSVDFAVNTEGVYSEPHPIGTRYLTRPL

SEQ ID NO: 3426 - protein, 737 aa, Artificial Sequence
  Synthetic polypeptide
MAADGYLPDWLEDNLSEGIREWWDLKPGAPKPKANQQKQDDGRGLVLPGYKYLGPFNGLDKGEPVNAADAAALEHDKAYDQQLKAGDNPYLRYNHADAEFQERLQEDTSFGGNLGRAVFQAKKRVLEPLGLVEEGAKTAPGKKRPVEPSPQRSPDSSTGIGKKGQQPARKRLNFGQTGDSESVPDPQPLGEPPATPAAVGPTTMASGGGAPMADNNEGADGVGNASGNWHCDSTWLGDRVITTSTRTWALPTYNNHLYKQISSASTGASNDNHYFGYSTPWGYFDFNRFHCHFSPRDWQRLINNNLGSRPKRLNFKLFIIQVKEVTTNDGVTTIANNLTSTVQVFSDSEYQLPYVLGSAHQGCLPPFPADVFMIPQYGYLTLNNGSQAVGRSSFYCLEYFPSQMLRTGNNFTFSYTFEDVPFHSSYAHSQSLDRLMNPLIDQYLYYLNRTQNQSGSAQNKDLLFSRGSPAGMSVQPKNWLPGPCYRQQRVSKTKTDNNNSNFTWTGASKYNLNGRESIINPGTAMASHKDDKDKFFPMSGVMIFGKESAGASNTALDNVMITDEEEIKATNPVATERFGTVAVNLQSSSTDPATGDVHVMGALPGMVWQDRDVYLQGPIWAKIPHTDGHFHPSPLMGGFGLKHPPPQILIKNTPVPANPPAEFSATKFASFITQYSTGQVSVEIEWELQKENSKRWNPEVQYTSNYAKSANVDFTVDNNGLYTEPRPIGTRYLTRPL

SEQ ID NO: 3427 - protein, 736 aa, Artificial Sequence
  Synthetic polypeptide
MAADGYLPDWLEDNLSEGIREWWALKPGAPKPKANQQKQDDGRGLVLPGYKYLGPFNGLDKGEPVNAADAAALEHDKAYDQQLKAGDNPYLRYNHADAEFQERLQEDTSFGGNLGRAVFQAKKRLLEPLGLVEEAAKTAPGKKRPVEQSPQEPDSSSGIGKTGQQPAKKRLNFGQTGDSESVPDPQPIGEPPATPAAVGPTTMASGGGAPMADNNEGADGVGNSSGNWHCDSTWLGDRVITTSTRTWALPTYNNHLYKQISSASTGASNDNHYFGYSTPWGYFDFNRFHCHFSPRDWQRLINNNWGFRPKRLNFKLFNIQVKEVTQNEGTKTIANNLTSTIQVFTDSEYQLPYVLGSAHQGCLPPFPADVFMIPQYGYLTLNNGSQAVGRSSFYCLEYFPSQMLRTGNNFTFSYTFEDVPFHSSYAHSQSLDRLMNPLIDQYLYYLSRTQTTGGTANTQTLGFSQGGPNTMANQAKNWLPGPCYRQQRVSTTTGQNNNSNFAWTAGTKYHLNGRNSLANPGIAMATHKDDKERFFPSNGILIFGKQNAARDNADYSDVMLTSEEEIKTTNPVATEEYGIVADNLQQQNTAPQIGTVNSQGALPGMVWQNRDVYLQGPIWAKIPHTDGNFHPSPLMGGFGLKHPPPQILIKNTPVPADPPTTFNQSKLNSFITQYSTGQVSVEIEWELQKENSKRWNPEIQYTSNYYKSTSVDFAVNTEGVYSDPHPIGTRYLTRPL

SEQ ID NO: 3428 - protein, 736 aa, Artificial Sequence
  Synthetic polypeptide
MAADGYLPDWLEDNLSEGIREWWALKPGAPKPKANQQEQDDGRGLVLPGYKYLGPFNGLDKGEPVNAADAAALEHDKAYDQQLKAGDNPYLRYNHADAEFQERLQEDTSFGGNLGRAVFQAKKRVLEPFGLVEEGAKTAPGKKRPVEQSPQEPDSSSGIGKTGQQPAKKRLNFGQTGDSESVPDPQPLGEPPAAPSGVGPNTMAAGGGAPMADNNEGADGVGSSSGNWHCDSTWLGDRVITTSTRTWALPTYNNHLYKQISSASTGASNDNHYFGYSTPWGYFDFNRFHCHFSPRDWQRLINNNWGFRPKRLNFKLFNIQVKEVTQNEGTKTIANNLTSTIQVFTDSEYQLPYVLGSAHQGCLPPFPADVFMIPQYGYLTLNNGSQAVGRSSFFCLEYFPSQMLRTGNNFTFSYTFEDVPFHSSYAHSQSLDRLMNPLIDQYLYYLSRTQTTGGTANTQTLGFSQGGPNTMANQAKNWLPGPCYRQQRVSTTTGQNNNSNFAWTAGTKYHLNGRNSLANPGIAMATHKDDKERFFPSNGILIFGKQNAARDNADYSDVMLTSEEEIKTTNPVATEEYGIVADNLQQQNTAPQIGTVNSQGALPGMVWQNRDVYLQGPIWAKIPHTDGNFHPSPLMGGFGLKHPPPQILIKNTPVPADPPTTFNQSKLNSFITQYSTGQVSVEIEWELQKENSKRWNPEIQYTSNYYKSTSVDFAVNTEGVYSEPHPIGTRYLTRPL

SEQ ID NO: 3429 - protein, 736 aa, Artificial Sequence
  Synthetic polypeptide
MAADGYLPDWLEDNLSEGIREWWDLKPGAPKPKANQQKQDDGRGLVLPGYKYLGPFNGLDKGEPVNAADAAALEHDKAYDQQLKAGDNPYLRYNHADAEFQERLQEDTSFGGNLGRAVFQAKKRVLEPLGLVEEGAKTAPGKKRPVEQSPQEPDSSSGIGKTGQQPAKKRLNFGQTGDSESVPDPQPLGEPPATPAAVGPTTMASGGGAPMADNNEGADGVGNASGNWHCDSTWLGDRVITTSTRTWALPTYNNHLYKQISSASTGASNDNHYFGYSTPWGYFDFNRFHCHFSPRDWQRLINNNWGFRPKRLNFKLFNIQVKEVTTNDGVTTIANNLTSTVQVFSDSEYQLPYVLGSAHQGCLPPFPADVFMIPQYGYLTLNNGSQAVGRSSFYCLEYFPSQMLRTGNNFTFSYTFEDVPFHSSYAHSQSLDRLMNPLIDQYLYYLNRTQNQSGSAQNKDLLFSRGSPAGMSVQPKNWLPGPCYRQQRVSKTKTDNNNSNFTWTGASKYNLNGRESIINPGTAMASHKDDKDKFFPMSGVMIFGKESAGASNTALDNVMITDEEEIKATNPVATERFGTVAVNLQNSSTDPATGDVHVMGALPGMVWQDRDVYLQGPIWAKIPHTDGHFHPSPLMGGFGLKHPPPQILIKNTPVPANPPAEFSATKFASFITQYSTGQVSVEIEWELQKENSKRWNPEVQYTSNYAKSANVDFTVDNNGLYTVPRPIGTRYLTRPL

SEQ ID NO: 3430 - protein, 736 aa, Artificial Sequence
  Synthetic polypeptide
MAADGYLPDWLEDNLSEGIREWWALKPGAPKPKANQQKQDDGRGLVLPGYKYLGPFNGLDKGEPVNAADAAALEHDKAYDQQLKAGDNPYLRYNHADAEFQERLQEDTSFGGNLGRAVFQAKKRLLEPLGLVEEGAKTAPGKKRPVEQSPQEPDSSSGIGKTGEQPAKKRLNFGQTGDSESVPDPQPLGEPPATPAAVGPTTMASGGGAPMADNNEGADGVGSASGNWHCDSTWLGDRVITTSTRTWALPTYNNHLYKQISSASTGASNDNHYFGYSTPWGYFDFNRFHCHFSPRDWQRLINNNWGFRPKRLNFKLFNIQVKEVTDNNGVKTIANNLTSTIQVFTDSEYQLPYVLGSAHQGCLPPFPADVFMIPQYGYLTLNNGSQAVGRSSFYCLEYFPSQMLRTGNNFPFSYTFEDVPFHSSYAHSQSLDRLMNPLIDQYLYYLSRTQTTGGTANTQTLGFSQGGPNTMANQAKNWLPGPCYRQQRVSTTTGQNNNSNFAWTAGTKYHLNGRNSLANPGIAMATHKDDKERFFPSNGILIFGKQNAARDNADYSDVMLTSEEEIKTTNPVATEEYGIVADNLQQQNTAPQIGTVNSQGALPGMVWQNRDVYLQGPIWAKIPHTDGNFHPSPLMGGFGLKHPPPQILIKNTPVPADPPTTFNQSKLNSFITQYSTGQVSVEIEWELQKENSKRWNPEIQYTSNYYKSTSVDFAVNTEGVYSEPHPIGTRYLTRPL

SEQ ID NO: 3431 - protein, 736 aa, Artificial Sequence
  Synthetic polypeptide
MAADGYLPDWLEDNLSEGIREWWALKPGAPKPKANQQKQDDGRGLVLPGYKYLGPFNGLDKGEPVNAADAAALEHDKAYDQQLKAGDNPYLRYNHADAEFQERLQEDTSFGGNLGRAVFQAKKRVLEPLGLVEEGAKTAPGKKRPVEQSPQEPDSSSGIGKTGQQPAKKRLNFGQTGDSESVPDPQPLGEPPATPAAVGPTTMASGGGAPMADNNEGADGVGSSSGNWHCDSQWLGDRVITTSTRTWALPTYNNHLYKQISSASTGASNDNHYFGYSTPWGYFDFNRFHCHFSPRDWQRLINNNWGFRPKRLNFKLFNIQVKEVTDNNGVKTIANNLTSTVQVFTDSEYQLPYVLGSAHQDCLPPFPADVFMIPQYGYLTLNNGSQAVGRSSFYCLEYFPSQMLRTGNNFTFSYTFEDVPFHSSYAHSQSLDRLMNPLIDQYLYYLSRTQTTGGTANTQTLGFSQGGPNTMANQAKNWLPGPCYRQQRVSTTTGQNNNSNFAWTAGTKYHLNGRNSLANPGIAMATHKDDKERFFPSNGILIFGKQNAARDNADYSDVMLTSEEEIKTTNPVATEEYGIVADNLQQQNTAPQIGTVNSQGALPGMVWQNRDVYLQGPIWAKIPHTDGNFHPSPLMGGFGLKHPPPQILIKNTPVPADPPTTFNQSKLNSFITQYSTGQVSVEIEWELQKENSKRWNPEIQYTSNYYKSTSVDFAVNTEGVYSEPHPIGTRYLTRPL

SEQ ID NO: 3432 - protein, 735 aa, Artificial Sequence
  Synthetic polypeptide
MAADGYLPDWLEDNLSEGIREWWDLKPGAPKPKANQQKQDDGRGLVLPGYKYLGPFNGLDKGEPVNAADAAALEHDKAYDQQLKAGDNPYLRYNHADAEFQERLQEDTSFGGNLGRAVFQAKKRVLEPLGLVEEGAKTAPGKKRPVEQSPQEPDSSSGIGKTGQQPAKKRLNFGQTGDSESVPDPQPLGEPPATPAAVGPTTMASGGGAPMADNNEGADGVGNASGNWHCDSTWLGDVITTSTRTWALPTYNNHLYKQISSASTGASNDNHYFGYSTPWGYFDFNRFHCHFSPRDWQRLINNNWGFRPKRLNFKLFNIQVKEVTQNEGTKTIANNLTSTIQVFTDSEYQLPYVLGSAHQGCLPPFPADVFMIPQYGYLTLNNGSQAVGRSSFYCLEYFPSQMLRTGNNFQFTYTFEDVPFHSSYAHSQSLDRLMNPLIDQYLYYLSRTQTTGGTANTQTLGFSQGGPNTMANQAKNWLPGPCYRQQRVSTTTGQNNNSNFAWTAGTKYHLNGRNSLANPGIAMATHKDDKERFFPSNGILIFGKQNAARDNADYSDVILTSEEEIKTTNPVATEEYGIVADNLQQQNTAPQIGTVNSQGALPGMVWQNRDVYLQGPIWAKIPHTDGNFHPSPLMGGFGLKHPPPQILIKNTPVPADPPTTFNQSKLNSFITQYSTGQVSVEIEWELQKENSKRWNPEIQYTSNYYKSTSVDFAVNTEGVYSEPHPIGTRYLTRPL

SEQ ID NO: 3433 - protein, 736 aa, Artificial Sequence
  Synthetic polypeptide
MAADGYLPDWLEDTLSEGIRQWWKLKPGPPPPKPAERHKDDSRGLVLPGYKYLGPFNGLDKGEPVNEADAAALEHDKAYDRQLDSGDNPYLKYNHADAEFQERLKEDTSFGGNLGRAVFQAKKRVLEPFGLVEEGAKTAPGKKRPVEQSPQEPDSSSGIGKTGQQPAKKRLNFGQTGDSESVPDPQPLGEPPATPAAVGPTTMASGGGAPMADNNEGADGVGNASGNWHCDSTWLGDRVITTSTRTWALPTYNNHLYKQISSTSTGASNDNHYFGYSTPWGYFDFNRFHCHFSPRDWQRLINNNWGFRPKRLNFKLFNIQVKEVTDNNGVKTIANNLTSTVQVFTDSEYQLPYVLGSAHQGCLPPFPADVFMIPQYGYLTLNNGSQAVGRSSFYCLEYFPSQMLRTGNNFTFSYTFEDVPFHSSYAHSQSLDRLMNPLIDQYLYYLSRTQTTGGTANTQTLGFSQGGPNTMANQAKNWLPGPCYRQQRVSTTTGQNNNSNFAWTAGTKYHLNGRNSLANPGIAMATHKDDKERFFPSNGILIFGKQNAARDNADYSDVMLTSEEEIKTTNPVATEEYGIVADNLQQQNTAPQIGTVNSQGALPGMVWQNRDVYLQGPIWAKIPHTDGNFHPSPLMGGFGLKHPPPQILIKNTPVPADPPTTFNQSKLNSFITQYSTGQVSVEIEWELQKENSKRWNPEIQYTSNYYKSTSVDFAVNTEGVYSEPHPIGTRYLTRPL

SEQ ID NO: 3434 - protein, 735 aa, Artificial Sequence
  Synthetic polypeptide
MAADGYLPDWLEDNLSEGIREWWDLKPGAPKPKANQQKQDDGRGLVLPGYKYLGPFNGLDKGEPVNAADAAALEHDKAYDRQLDSGDNPYLRYNHADAEFQERLKEDTSFGGNLGRAVFQAKKRVLEPFGLVEEGAKTAPGKKRPVEQSPQEPDSSSGIGKTGQQPAKKRLNFGQTGDSESVPDPQPLGEPPATPAAVGPTTMASGGGAPMADNNEGADGVGNASGNWHCDSTWLGDRVITTSTRTWALPTYNNHLYKQISSASTGASNDNHYFGYSTPWGYFDFNRFHCHFSPRDWQRLINNNWGFRPKRLNFKLFNIQVKEVTQNEGTKTIANNLTSTIQVFTDSEYQLPYVLGSAHQGCLPPFPADVFMIPQYGYLTLNNGSQAVGRSSFYCLEYFPSQMLRTGNNFQFTYTFEDVPFHSSYAHSQSLDRLMNPLIDQYLYYLSRTQTTGGTANTQTLGFSQGGPNTMANQAKNWLPGPCYRQQRVSTTTGQNNNSNFAWTAGTKYHLNGRNSLANPGIAMATHKDDRSVFFQYRDPDFGKQNAARDNADYSDVMLTSEEEIKTTNPVATEEYGIVADNLQQQNTAPQIGTVNSQGALPGMVWQNRDVYLQGPIWAKIPHTDGNFHPSPLMGGFGLKHPPPQILIKNTPVPADPPTTFNQSKLNSFITQYSTGQVSVEIEWELQKENSKRWNPEIQYTSNYYKSTSVDFAVNTEGVYSEPHPIGTRYLTRPL

SEQ ID NO: 3435 - protein, 736 aa, Artificial Sequence
  Synthetic polypeptide
MAADGYLPDWLEDNLSEGIREWWALKPGAPKPKANQQKQDDGRGLVLPGYKYLGPFNGLDKGEPVNAADAAALEHDKAYDQQLKAGDNPYLKYNHADAEFQERLQGDTSFGGNLGRAVFQAKKRVLEPLGLVEEAAKTAPGKKRPVEQSPQEPDSSAGIGKSGAQPAKKRLNFGQTGDTESVPDPQPLGEPPAAPSGVGPNTMAAGGGAPMADNNEGADGVGSSSGNWHCDSQWLGDRVITTSTRTWALPTYNNHLYKQISSASTGASNDNHYFGYSTPWGYFDFNRFHCHFSPRDWQRLINNNWGFRPKRLNFKLFNIQVKEVTDNNGVKTIANNLTSTVQVFTDSDYQLPYVLGSAHEGCLPPFPADVFMIPQYGYLTLNNGSQAVGRSSFYCLEYFPSQMLRTGNNFQFTYTFEDVPFHSSYAHSQSLDRLMNPLIDQYLYYLSRTQTTGGTANTQTLGFSQGGPNTMANQAKNWLPGPCYRQQRVSTTTGQNNNSNFAWTAGTKYHLNGRNSLANPGIAMATHKDDKERFFPSNGILIFGKQNAARDNADYSDVMLTSEEEIKTTNPVATEEYGIVADNLQQQNTAPQIGTVNSQGALPGMVWQNRDVYLQGPIWAKIPHTDGNFHPSPLMGGFGLKHPPPQILIKNTPVPADPPTTFNQSKLNSFITQYSTGQVSVEIEWELQKENSKRWNPEIQYTSNYYKSTSVDFAVNTEGVYSEPHPIGTRYLTRPL

SEQ ID NO: 3436 - protein, 736 aa, Artificial Sequence
  Synthetic polypeptide
MAADGYLPDWLEDTLSEGIRQWWKLKPGPPPPKPAERHKDDSRGLVLPGYKYLGPFNGLDKGEPVNEADAAALEHDKAYDRQLDSGDNPYLKYNHADAEFQERLKEDTSFGGNLGRAVFQAKKRVLEPFGLVEEAAKTAPGKKRPVEQSPQEPDSSSGIGKTGQQPAKKRLNFGQTGDSESVPDPQPLGEPPATPAAVGPTTMASGGGAPMADNNEGADGVGNASGNWHCDSTWLGDRVITTSTRTWALPTYNNHLYKQISSASTGASNDNHYFGYSTPWGYFDFNRFHCHFSPRDWQRLINNNWGFRPKRLNFKLFNIQVKEVTDNNGVKTIANNLTSTVQVFTDSDYQLPYVLGSAHEGCLPPFPADVFMIPQYGYLTLNNGSQAVGRSSFYCLEYFPSQMLRTGNNFTFSYTFEDVPFHSSYAHSQSLDRLMNPLIDQYLYYLSRTQTTGGTANTQTLGFSQGGPNTMANQAKNWLPGPCYRQQRVSTTTGQNNNSNFAWTAGTKYHLNGRNSLANPGIAMATHKDDKERFFPSNGILIFGKQNAARDNADYSDVMLTSEEEIKTTNPVATEEYGIVADNLQQQNTAPQIGTVNSQGALPGMVWQNRDVYLQGPIWAKIPHTDGNFHPSPLMGGFGLKHPPPQILIKNTPVPADPPTTFNQSKLNSFITQYSTGQVSVEIEWELQKENSKRWNPEIQYTSNYYKSTSVDFAVNTEGVYSEPHPIGTRYLTRPL

SEQ ID NO: 3437 - protein, 736 aa, Artificial Sequence
  Synthetic polypeptide
MAADGYLPDWLEDNLSEGIREWWALKPGAPKPKANQQKQDDGRGLVLPGYKYLGPFNGLDKGEPVNAADAAALEHDKAYDQQLKAGDNPYLRYNHADAEFQERLQEDTSFGGNLGRAVFQAKKRVLEPLGLVEEGAKTAPGKKRPVEQSPQEPDSSSGIGKTGQQPAKKRLNFGQTGDSESVPDPQPLGEPPATPAAVGPTTMASGGGAPMADNNEGADGVGSSSGNWHCDSTWLGDRVITTSTRTWALPTYNNHLYKQISSASTGASNDNHYFGYSTPWGYFDFNRFHCHFSPRDWQRLINNNWGFRPKRLNFKLFNIQVKEVTDNNGVKTIANNLTSTVQVFTDSEYQLPYVLGSAHQGCLPPFPADVFMIPQYGYLTLNNGSQAVGRSSFYCLEYFPSQMLRTGNNFTFSYTFEDVPFHSSYAHSQSLDRLMNPLIDQYLYYLSRTQTTGGTANTQTLGFSQGGPNTMANQAKNWLPGPCYRQQRVSTTTGQNNNSNFAWTAGTKYHLNGRNSLANPGIAMATHKDDKERFFPSNGILIFGKQNAARDNADYSDVMLTSEEEIKTTNPVATEEYGIVADNLQQQNTAPQIGTVNSQGALPGMVWQNRDVYLQGPIWAKIPHTDGNFHPSPLMGGFGLKHPPPQILIKNTPVPADPPTTFNQSKLNSFITQYSTGQVSVEIEWELQKENSKRWNPEIQYTSNYYKSTSVDFAVNTEGVYSEPHPIGTRYLTRPL

SEQ ID NO: 3438 - protein, 737 aa, Artificial Sequence
  Synthetic polypeptide
MAADGYLPDWLEDNLSEGIREWWALKPGAPKPKANQQKQDDGRGLVLPGYKYLGPFNGLDKGEPVNAADAAALEHDKAYDQQLKAGDNPYLRYNHADAEFQERLQEDTSFGGNLGRAVFQAKKRVLEPLGLVEEGAKTAPGKKRPVEQSPQEPDSSSGIGKTGQQPAKKRLNFGQTGDTESVPDPQPIGEPPAAPSGVGSLTMASGGGAPVADNNEGADGVGSSSGNWHCDSQWLGDRVITTSTRTWALPTYNNHLYKQISNSTSGGSSNDNAYFGYSTPWGYFDFNRFHCHFSPRDWQRLINNNWGFRPKRLNFKLFNIQVKEVTQNEGTKTIANNLTSTIQVFTDSEYQLPYVLGSAHQGCLPPFPADVFMIPQYGYLTLNNGSQAVGRSSFYCLEYFPSQMLRTGNNFQFTYTFEDVPFHSSYAHSQSLDRLMNPLIDQYLYYLSRTQTTGGTANTQTLGFSQGGPNTMANQAKNWLPGPCYRQQRVSTTTGQNNNSNFAWTAGTKYHLNGRNSLANPGIAMATHKDDKERFFPSNGILIFGKQNAARDNADYSDVMLTSEEEIKTTNPVATEEYGIVADNLQQQNTAPQIGTVNSQGALPGMVWQNRDVYLQGPIWAKIPHTDGNFHPSPLMGGFGLKHPPPQILIKNTPVPADPPTTFNQSKLNSFITQYSTGQVSVEIEWELQKENSKRWNPEIQYTSNYYKSTSVDFAVNTEGVYSEPHPIGTRYLTRPL

SEQ ID NO: 3439 - protein, 736 aa, Artificial Sequence
  Synthetic polypeptide
MAADGYLPDWLEDNLSEGIREWWALKPGAPKPKANQQKQDDGRGLVLPGYKYLGPFNGLDKGEPVNAADAAALEHDKAYDQQLKAGDNPYLKYNHADAEFQERLQGDTSFGGNLGRAVFQAKKRVLEPLGLVEEAAKTAPGKKRPVEQSPQEPDSSAGIGKSGAQPAKKRLNFGQTGDTESVPDPQPLGEPPAAPSGVGPNTMAAGGGAPMADNNEGADGVGSSSGNWHCDSQWLGDRVITTSTRTWALPTYNNHLYKQISSASTGASNDNHYFGYSTPWGYFDFNRFHCHFSPRDWQRLINNNWGFRPKRLNFKLFNIQVKEVTDNNGVKTIANNLTSTVQVFTDSEYQLPYVLGSAHQGCLPPFPADVFMIPQYGYLTLNNGSQAVGRSSFYCLEYFPSQMLRTGNNFTFSYTFEDVPFHSSYAHSQSLDRLMNPLIDQYLYYLSRTQTTGGTANTQTLGFSQGGPNTMANQAKNWLPGPCYRQQRVSTTTGQNNNSNFAWTAGTKYHLNGRNSLANPGIAMATHKDDKERFFPSNGILIFDKQNAARDNADYSDVMLTSEEEIKTTNPVATEEYGIVADNLQQQNTAPQIGTVNSQGALPGMVWQNRDVYLQGPIWAKIPHTDGNFHPSPLMGGFGLKHPPPQILIKNTPVPADPPTTFNQSKLNSFITQYSTGQVSVEIEWELQKENSKRWNPEIQYTSNYYKSTSVDFAVNTEGVYSEPHPIGTRYLTRPL

SEQ ID NO: 3440 - protein, 736 aa, Artificial Sequence
  Synthetic polypeptide
MAADGYLPDWLEDTLSEGIRQWWKLKPGPPPPKPAERHKDDSRGLVLPGYKYLGPFNGLDKGEPVNEADAAALEHDKAYDRQLDSGDNPYLKYNHADAEFQERLKEDTSFGGNLGRAVFQAKKRVLEPLGLVEEPVKTAPGKKRPVEHSPVEPDSSSGTGKAGQQPARKRLNFGQTGDSESVPDPQPLGEPPATPAAVGPNTMATGSGAPMADNNEGADGVGNSSGNWHCDSTWMGDRVITTSTRTWALPTYNNHLYKQISSASTGASNDNHYFGYSTPWGYFDFNRFHCHFSPRDWQRLINNNWGFRPKRLNFKLFNIQVKEVTDNNGVKTIANNLTSTIQVFTDSEYQLPYVLGSAHQGCLPPFPADVFMIPQYGYLTLNNGSQAVGRSSFYCLEYFPSQMLRTGNNFTFSYTFEDVPFHSSYAHSQSLDRLMNPLIDQYLYYLSRTQTTGGKANTQTLGFSQGGPNTMANQAKNWLPGPCYRQQRVSTTTGQNNNSNFAWTAGTKYHLNGRNSLANPGIAMATHKDDKERFFPSNGILIFGKQNAARDNADYSDVMLTSEEEIKTTNPVATEEYGIVADNLQQQNTAPQIGTVNSQGALPGMVWQNRDVYLQGPIWAKIPHTDGNFHPSPLMGGFGLKHPPPQILIKNTPVPADPPTTFNQSKLNSFITQYSTGQVSVEIEWELQKENSKRWNPEIQYTSNYYKSTSVDFAVNTEGVYSEPHPIGTRYLTRPL

SEQ ID NO: 3441 - protein, 736 aa, Artificial Sequence
  Synthetic polypeptide
MAADGYLPDWLEDNLSEGIREWWALKPGAPKPKANQQKQDDGRGLVLPGYKYLGPFNGLDKGEPVNAADAAALEHDKAYDQQLKAGDNPYLRYNHADAEFQERLQEDTSFGGNLGRAVFQAKKRVLEPFGLVEEGAKTAPGKKRPVEQSPQEPDSSSGIGKTGQQPAKKRLNFGQTGDSESVPDPQPLGEPPATPAAVGPTTMASGGGAPMADNNEGADGVGNASGNWHCDSTWLGDRVITTSTRTWALPTYNNHLYKQISSASTGASNDNHYFGYSTPWGYFDFNRFHCHFSPRDWQRLINNNWGFRPKRLNFKLFNIQVKEVTDNNGVKTIANNLTSTVQVFTDSEYQLPYVLGSAHQGCLPPFPADVFMIPQYGYLTLNNGSQAVGRSSFYCLEYFPSQMLRTGNNFTFSYTFEDVPFHSSYAHSQSLDRLMNPLIDQYLYYLSRTQTTGGTGNTQTLGFSQGGPNTMANQAKNWLPGPCYRQQRVSTTTGQNNNSNFAWTAGTKYHLNGRNSLANPGIAMATHKDDKERFFPSNGILIFGKQNAARDNADYSDVMLTSEEEIKTTNPVATEEYGIVADNLQQQNTAPQIGTVNSQGALPGMVWQNRDVYLQGPIWAKIPHTDGNFHPSPLMGGFGLKHPPPQILIKNTPVPADPPTTFNQSKLNSFITQYSTGQVSVEIEWELQKENSKRWNPEIQYTSNYYKSTSVDFAVNTEGVYSEPHPIGTRYLTRPL

SEQ ID NO: 3442 - protein, 736 aa, Artificial Sequence
  Synthetic polypeptide
MAADGYLPDWLEDNLSEGIREWWDLKPGAPKPKANQQKQDDGRGLVLPGYKYLGPFNGLDKGEPVNAADAAALEHDKAYDQQLKAGDNPYLRYNHADAEFQERLQEDTSFGGNLGRAVFQAKKRVLEPLGLVEEGAKTAPGKKRPVEQSPQEPDSSSGIGKTGQQPAKKRLNFGQTGDSESVPDPQPLGEPPATPAAVGPTTMASGGGAPMADNNEGADGVGSSSGNWHCDSTWLGDRVITTSTRTWALPTYNNHLYKQISSASTGASNDNHYFGYSTPWGYFDFNRFHCHFSPRDWQRLINNNWGFRPKRLNFKLFNIQVKEVTQNEGTKTIANNLTSTIQVFTDSEYQLPYVLGSAHQGCLPPFPADVFMIPQYGYLTLNNGSQAVGRSSFYCLEYFPSQMLRTGNNFTFSYTFEDVPFHSSYAHSQSLDRLMNPLIDQYLYYLSRTQTTGGTANTQTLGFSQGGPNTMANQAKNWLPGPCYRQQRVSTTTGQNNNSNFAWTAGTKYHLNGRNSLANPGIAMATHKDDKERFFPSNGILIFGKQNAARDNADYSDVMLTSEEEIKTTNPVATEEYGIVADNLQQQNTAPQIGTVNSQGALPGMVWQNRDVYLQGPIWAKIPHTDGNFHPSPLMGGFGLKHPPPQILIKNTPVPADPPTTFNQSKLNSFITQYSTGQVSVEIEWELQKENSKRWNPEIQYTSNYYKSTSVDFAVNTEGVYSEPHPIGTRYLTRPL

SEQ ID NO: 3443 - protein, 736 aa, Artificial Sequence
  Synthetic polypeptide
MAADGYLPDWLEDNLSEGIREWWALKPGAPKPKANQQKQDDGRGLVLPGYKYLGPFNGLDKGEPVNAADAAALEHDKAYDQQLKAGDNPYLRYNHADAEFQERLQEDTSFGGNLGRAVFQAKKRVLEPLGLVEEGAKTAPGKKRPVEQSPQEPDSSSGIGKTGQQPAKKRLNFGQTGDSESVPDPQPLGEPPATPAAVGPTTMAAGGGAPMADNNEGADGVGSSSGNWHCDSTWMGDRVITTSTRTWALPTYNNHLYKQISSASTGASNDNHYFGYSTPWGYFDFNRFHCHFSPRDWQRLINNNWGFRPKRLSFKLFNIQVKEVTQNEGTKTIANNLTSTIQVFTDSEYQLPYVLGSAHQGCLPPFPADVFMIPQYGYLTLNNGSQAVGRSSFYCLEYFPSQMLRTGNNFTFSYTFEDVPFHSSYAHSQSLDRLMNPLIDQYLYYLSRTQTTGGTANTQTLGFSQGGPNTMANQAKNWLQGPCYRQQRVSTTTGQNNNSNFAWTAGTKYHLNGRNSLANPGIAMATHKDDKERFFPSNGILIFGKQNAARDNADYSDVMLTSEEEIKTTNPVATEEYGIVADNLQQQNTAPQIGTVNSQGALPGMVWQNLDVYLQGPIWAKIPHTDGNFHPSPLMGGFGLKHPPPQILIKNTPVPADPPTTFNQSKLNSFITQYSTGQVSVEIEWELQKENSKRWNPEIQYTSNYYKSTSVDFAVNTEGVYSEPHPIGTRYLTRPL

SEQ ID NO: 3444 - protein, 737 aa, Artificial Sequence
  Synthetic polypeptide
MAADGYLPDWLEDNLSEGIREWWALKPGAPKPKANQQKQDDGRGLVLPGYKYLGPFNGLDKGEPVNAADAAALEHDKAYDQQLKAGDNPYLRYNHADAEFQERLQEDTSFGGNLGRAVFQAKKRVLEPLGLVEEGAKTAPGKKRPVEPSPQRSPDSSSGIGKTGQQPAKKRLNFGQTGDSESVPDPQPLGEPPATPAAVGPTTMASGGGAPMADNNEGADGVGNASGNWHCDSQWLGDRVITTSTRTWALPTYNNHLYKQISSASTGASNDNHYFGYSTPWGYFDFNRFHCHFSPRDWQRLINNNWGFRPKRLNFKLFNIQVKEVTDNNGVKTIANNLTSTVQVFTDSDYQLPYVLGSAHEGCLPPFPADVFMIPQYGYLTLNNGSQAVGRSSFYCLEYFPSQMLRTGNNFQFTYTFEDVPFHSSYAHSQSLDRLMNPLIDQYLYYLSRTQTTGGTANTQTLGFSQGGPNTMANQAKNWVPGPCYRQQRVSTATGQNNNSNFAWTAGTKYHLKGRNSLANPGIAMATHKDDKERFFPSNGILIFGKQNAARDNADYSDVMLTSEEEIKTTNPVATEEYGIVADNLQQQNTAPQIGTVNSQGALPGMVWQNRDVYLQGPIWAKIPHTDGNFHPSPLMGGFGLKHPPPQILIKNTPVPADPPTTFNQSKLNSFITQYSTGQVSVEIEWELQKENSKRWNPEIQYTSNYYKSTSVDFAVNTEGVYSEPHPIGTRYLTRPL

SEQ ID NO: 3445 - protein, 737 aa, Artificial Sequence
  Synthetic polypeptide
  MOD_RES (226)..(226): Any naturally occurring amino acid
  MOD_RES (233)..(233): Any naturally occurring amino acid
  MOD_RES (239)..(239): Any naturally occurring amino acid
  MOD_RES (250)..(250): Any naturally occurring amino acid
  MOD_RES (253)..(253): Any naturally occurring amino acid
  MOD_RES (255)..(255): Any naturally occurring amino acid
MAADGYLPDWLEDTLSEGIRQWWKLKPGPPPPKPAERHKDDSRGLVLPGYKYLGPFNGLDKGEPVNEADAAALEHDKAYDRQLDSGDNPYLKYNHADAEFQERLKEDTSFGGNLGRAVFQAKKRVLEPLGLVEEGAKTAPGKKRPVEQSPQEPDSSSGIGKTGQQPAKKRLNFGQTGDSESVPDPQPLGEPPATPSGVGPNTMAAGGGAPMADNNEGADGVGSSSXNWHCDSXWLGDRXITTSTRTWALXTYXNXLYKQISNSTSGGATNDNTYFGYSTPWGYFDFNRFHCHFSPRDWQRLINNNWGFRPKRLNFKLFNIQVKEVTQNEGTKTIANNLTSTIQVFTDSEYQLPYVLGSAHQGCLPPFPADVFMIPQYGYLTLNNGSQAVGRSSFYCLEYFPSQMLRTGNNFQFTYTFEDVPFHSSYAHSQSLDRLMNPLIDQYLYYLSRTQTTGGTANTQTLGFSQGGPNTMANQAKNWLPGPCYRQQRVSTTTGQNNNSNFAWTAGTKYHLNGRNSLANPGIAMATHKDDKERFFPSNGILIFGKQNAARDNADYSDVMLTSEEEIKTTNPVATEEYGIVADNLQQQNTAPQIGTVNSQGALPGMVWQNRDVYLQGPIWAKIPHTDGNFHPSPLMGGFGLKHPPPQILIKNTPVPADPPTTFSQAKLASFITQYSTGQVSVEIEWELQKENSKRWNPEVQYTSNYAKSANVDFTVDNNGLYTEPRPIGTRYLTRPL

SEQ ID NO: 3446 - protein, 737 aa, Artificial Sequence
  Synthetic polypeptide
MAADGYLPDWLEDNLSEGIREWWDLKPGAPKPKANQQKQDDGRGLVLPGYKYLGPFNGLDKGEPVNAADAAALEHDKAYDQQLKAGDNPYLRYNHADAEFQERLQEDTSFGGNLGRAVFQAKKRVLEPLGLVEEGAKTAPGKKRPVEPSPQRSPDSSTGIGKKGQQPAKKRLNFGQTGDSESVPDPQPIGEPPAGPSGVGSLTMASGGGAPVADNNEGADGVGSSSGNWHCDSQWLGDRVITTSTRTWALPTYNNHLYKQISSASTGASNDNHYFGYSTPWGYFDFNRFHCHFSPRDWQRLINNNWGFRPKRLNFKLFNIQVKEVTDNDGVKTIANNLTSTIQVFTDSEYQLPYVLGSAHQGCLPPFPADVFMIPQYGYLTLNNGSQAVGRSSFYCLEYFPSQMLRTGNNFTFSYTFEDVPFHSSYAHSQSLDRLMNPLIDQYLYYLSRTQTTGGTANTQTLGFSQGGPNTMANHAKNWLPGPCYRQQRVSTTTGQNNNSNFAWTAGTKYHLNGRNSLANPGIAMATHKDDKERFFPSNGILIFGKQNAARDNADYSDVMLTSEEEIKTTNPVATEEYGIVADNLQQQNTAPQIGTVNSQGALPGMVWQNRDVYLQGPIWAKIPHTDGNFHPSPLMGGFGLKHPPPQILIKNTPVPADPPTTFNQSKLNSFITQYSTGQVSVEIEWELQKENSKRWNPEIQYTSNYYKSTSVDFAVNTEGVYSEPHPIGTRYLTRPL

SEQ ID NO: 3447 - protein, 736 aa, Artificial Sequence
  Synthetic polypeptide
MAADGYLPDWLEDTLSEGIRQWWKLKPGPPPPKPAERHKDDSRGLVLPGYKYLGPFNGLDKGEPVNEADAAALEHDKAYDRQLDSGDNPYLKYNHADAEFQERLKEDTSFGGNLGRAVFQAKKRVLEPLGLVEEPVKTAPGKKRPVEHSPVEPDSSSGTGKAGQQPAKKRLNFGQTGDSESVPDPQPLGEPPATPAAVGPTTMASGGGAPMADNNEGADGVGNASGNWHCDSTWLGDRVITTSTRTWALPTYNNHLYKQISSASTGASNDNHYFGYSTPWGYFDFNRFHCHFSPRDWQRLINNNWGFRPKRLNFKLFNIQVKEVTQNEGTKTIANNLTSTIQVFTDSEYQLPYVLGSAHQGCLPPFPADVFMIPQYGYLTLNNGSQAVGRSSFYCLEYFPSQMLRTGNNFQFTYTFEDVPFHSSYAHSQSLDRLMNPLIDQYLYYLSRTQTTGGTANTQTLGFSQGGPNTMANQAKNWLPGPCYRQQRVSTTTGQNNNSNFAWTAGTKYHLNGRNSLANPGIAMATHKDDKERFFPSNGILIFGKQNAARDNADYSDVMLTSEEEIKTTNPVATEEYGIVADNLQQQNTAPQIGTVNSQGALPGMVWQNRDVYLQGPIWAKIPHTDGNFHPSPLMGGFGLKHPPPQILIKNTPVPADPPTTFNQSKLNSFITQYSTGQVSVEIEWELQKENSKRWNPEIQYTSNYYKSTSVDFAVNTEGVYSEPHPIGTRYLTRPL

SEQ ID NO: 3448 - protein, 736 aa, Artificial Sequence
  Synthetic polypeptide
MAADGYLPDWLEDNLSEGIREWWALKPGAPKPKANQQKQDDGRGLVLPGYKYLGPFNGLDKGEPVNAADAAALEHDKAYDQQLQAGDNPYLRYNHADAEFQERLQGDTSFGGNLGRAVFQAKKRVLEPLGLVEEGAKTAPGKKRPVEQSPQEPDSSSGIGKTGQQPAKKRLNFGQTGDSESVPDPQPLGEPPATPAAVGPTTMASGGGAPMADNNEGADGVGNASGNWHCDSTWLGDRVITTSTRTWALPTYNNHLYKQISSASTGASNDNHYFGYSTPWGYFDFNRFHCHFSPRDWQRLINNNWGFRPKRLNFKLFNIQVKEVTDNNGVKTIANNLTSTIQVFTDSEYQLPYVLGSAHQGCLPPFPADVFMIPQYGYLTLNNGSQAVGRSSFYCLEYFPSQMLRTGNNFQFTYTFEDVPFHSSYAHSQSLDRLMNPLIDQYLYYLSRTQTTGGTANTQTLGFSQGGPNTMANQAKNWLPGPCYRQQRVSTTTGQNNNSNFAWTAGTKYHLNGRNSLANPGIAMATHKDDKERFFPSNGILIFGKQNAARDNADYSDVMLTSEEEIKTTNPVATEEYGIVADNLQQQNTAPQIGTVNSQGALPGMVWQNRDVYLQGPIWAKIPHTDGNFHPSPLMGGFGLKHPPPQILIKNTPVPADPPTTFNQSKLNSFITQYSTGQVSVEIEWELQKENSKRWNPEIQYTSNYYKSTSVDFAVNTEGVYSEPHPIGTRYLTRPL

SEQ ID NO: 3449 - protein, 738 aa, Artificial Sequence
  Synthetic polypeptide
MAADGYLPDWLEDTLSEGIRQWWKLKPGPPPPKPAERHKDDSRGLVLPGYKYLGPFNGLDKGEPVNAADAAALEHDKAYDQQLKAGDNPYLRYNHADAEFQERLKEDTSFGGNLGRAVFQAKKRVLEPLGLVEEGAKTAPGKKRPVEPSPQRSPDSSTGIGKKGQQPARKRLNFGQTGDSESVPDPQPLGEPPAAPSGVGPNTMAAGGGAPMADNNEGADGVGSSSGNWHCDSQWLGDRVITTSTRTWALPTYNNHLYKQISNSTSGGSSNDNAYFGYSTPWGYFDFNRFHCHFSPRDWQRLINNNWGFRPKRLNFKLFNIQVKEVTDNNGVKTIANNLTSTVQVFTDSEYQLPYVLGSAHQGCLPPFPADVFMIPQYGYLTLNNGSQAVGRSSFYCLEYFPSQMLRTGNNFTFSYTFEDVPFHSSYAHSQSLDRLMNPLIDQYLYYLSRTQTTGGTANTQTLGFSQGGPNTMANQAKNWLPGPCYRQQRVSTTTGQNNNSNFAWTAGTKYHLNGRNSLANPGIAMATHKDDKERFFPSNGILIFGKQNAARDNADYSDVMLTSEEEIKTTNPVATEEYGIVADNLQQQNTAPQIGTVNSQGALPGMVWQNRDVYLQGPIWAKIPHTDGHFHPSPLMGGFGLKHPPPQILIKNTPVPANPPTTFNQSKLNSFITQYSTGQVSVEIEWELQKENSKRWNPEVQYTSNYAKSANVDFTVDNNGLYTEPRPIGTRYLTRPL

SEQ ID NO: 3450 - protein, 738 aa, Artificial Sequence; identical to SEQ ID NO: 3449
  Synthetic polypeptide

SEQ ID NO: 3451 - protein, 736 aa, Artificial Sequence
  Synthetic polypeptide
MAADGYLPDWLEDNLSEGIREWWALKPGAPKPKANQQKQDDGRGLVLPGYKYLGPFNGLDKGEPVNAADAAALEHDKAYDQQLKAGDNPYLRYNHADAEFQERLQEDTSFGGNLGRAVFQAKKRLLEPLGLVEEGAKTAPGKKRPVEQSPQEPDSSSGIGKTGQQPAKKRLNFGQTGDSESVPDPQPLGEPPATPAAVGPTTMASGGGAPMADNNEGADGVGNSSGNWHCDSTWMGDRVITTSTRTWALPTYNNHLYKQISSASTGASNDNHYFGYSTPWGYFDFNRFHCHFSPRDWQRLINNNWGFRPKRLNFKLFNIQVKEVTQNEGTKTIANNLTSTIQVFTDSEYQLPYVLGSAHQGCLPPFPADVFIIPQYGYLTLNNGSQAVGRSSFYCLEYFPSQMLRTGNNFTFSYTFEDVPFHSSYAHSQSLDRLMNPLIDQYLYYLSRTQTTGGTANTQTLGFSQGGPNTMANQAKNWLPGPCYRQQRVSTTTGQNNNSNFAWTAGTKYHLNGRNSLANPGIAMATHKDDKERFFPSNGILIFGKQNAARDNADYSDVMLTSEEEIKTTNPVATEEYGIVADNLQQQNTAPQIGTVNSQGALPGMVWQNRDVYLQGPIWAKIPHTDGNFHPSPLMGGFGLKHPPPQILIKNTPVPADPPTTFNQSKLNSFITQYSTGQVSVEIEWELQKENSKRWNPEIQYTSNYYKSTSVDFAVNTEGVYSEPHPIGTRYLTRPL

SEQ ID NO: 3452 - protein, 736 aa, Artificial Sequence
  Synthetic polypeptide
MAADGYLPDWLEDNLSEGIREWWALKPGAPKPKANQQKQDDGRGLVLPGYKYLGPFNGLDKGEPVNAADAAALEHDKAYDQQLKAGDNPYLRYNHADAEFQERLQEDTSFGGNLGRAVFQAKKRVLEPFGLVEEAAKTAPGKKRPVEQSPQEPDSSSGIGKTGQQPAKKRLNFGQTGDSESVPDPQPLGEPPATPAAVGPTTMASGGGAPMADNNEGADGVGNASGNWHCDSTWLGDRVITTSTRTWALPTYNNHLYKQISSASTGASNDNHYFGYSTPWGYFDFNRFHCHFSPRDWQRLINNNWGFRPKRLNFKLFNIQVKEVTQNEGTKTIANNLTSTIQVFTDSEYQLPYVLGSAHQGCLPPFPADVFMIPQYGYLTLNNGSQAVGRSSFYCLEYFPSQMLRTGNNFTFSYTFEDVPFHSSYAHSQSLDRLMNPLIDQYLYYLSRTQTTGGTANTQTLGFSQGGPNTMANHAKNWLPGPCYRQQRVSTTTGQNNNSNFAWTAGTKYHLNGRNSLANPGIAMATHKDDKERFFPSNGILIFGKQNAARDNADYSDVMLTSEEEIKTTNPVATEEYGIVADNLQQQNTAPQIGTVNSQGALPGMVWQNRDVYLQGPIWAKIPHTDGNFHPSPLMGGFGLKHPPPQILIKNTPVPADPPTTFNQSKLNSFITQYSTGQVSVEIEWELQKENSKRWNPEIQYTSNYYKSTSVDFAVNTEGVYSEPHPIGTRYLTRPL

SEQ ID NO: 3453 - protein, 736 aa, Artificial Sequence
  Synthetic polypeptide
MAADGYLPDWLEDNLSEGIREWWALKPGAPKPKANQQKQDDGRGLVLPGYKYLGPFNGLDKGEPVNEADAAALEHDKAYDQQLKAGDNPYLRYNHADAEFQERLQEDTSFGGNLGRAVFQAKKRLLEPLGLVEEAAKTAPGKKRPVEQSPQEPDSSAGIGKSGAQPAKKRLNFGQTGDSESVPDPQPLGEPPATPAAVGPTTMASGGGAPMADNNEGADGVGNASGNWHCDSTWLGDRVITTSTRTWALPTYNNHLYKQISSASTGASNDNHYFGYSTPWGYFDFNRFHCHFSPRDWQRLINNNWGFRPKRLNFKLFNIQVKEVTDNDGVKTIANNLTSTIQVFTDSEYQLPYVLGSAHQGCLPPFPADVFMIPQYGYLTLNNGSQAVGRSSFYCLEYFPSQMLRTGNNFQFTYTFEDVPFHSSYAHSQSLDRLMNPLIDQYLYYLSRTQTTGGTANTQTLGFSQGGPNTMANQAKNWLPGPCYRQQRVSTTTGQNNNSNFAWTAGTKYHLNGRNSLANPGIAMATHKDDKERFFPSNGILIFGKQNAARDNADYSDVMLTSEEEIKTTNPVATEEYGIVADNLQQQNTAPQIGTVNSQGALPGMVWQNRDVYLQGPIWAKIPHTDGNFHPSPLMGGFGLKHPPPQILIKNTPVPADPPTTFNQSKLNSFITQYSTGQVSVEIEWELQKENSKRWNPEIQYTSNYYKSTSVDFAVNTEGVYSEPHPIGTRYLTRPL

SEQ ID NO: 3454 - protein, 736 aa, Artificial Sequence
  Synthetic polypeptide
MAADGYLPDWLEDNLSEGIREWWALKPGAPKPKANQQKQDDGRGLVLPGYKYLGPFNGLDKGEPVNAADAAALEHDKAYDQQLKAGDNPYLRYNHADAEFQERLQEDTSFGGNLGRAVFQAKKRVLEPLGLVEEGAKTAPGKKRPVEQSPQEPDSSAGIGKTGAQPAKKRLNFGQTGDSESVPDPQPLGEPPATPAAVGPTTMASGGGAPMADNNEGADGVGSASGNWHCDSTWLGDRVITTSTRTWALPTYNNHLYKQISSASTGASNDNHYFGYSTPWGYFDFNRFHCHFSPRDWQRLINNNWGFRPKRLNFKLFNIQVKEVTDNNGVKTIANNLTSTIQVFTDSEYQLPYVLGSAHQGCLPPFPADVFMIPQYGYLTLNNGSQAVGRSSFYCLEYFPSQMLRTGNNFTFSYTFEDVPFHSSYAHSQSLDRLMNPLIDQYLYYLSRTQTTGGTANTQTLGFSQGGPNTMANQAKNWLPGPCYRQQRVSTTTGQNNNSNFAWTAGTKYHLNGRNSLANPGIAMATHKDDKERFFPSNGILIFGKQNAARDNADYSDVMLTSEEEIKTTNPVATEEYGIVADNLQQQNTAPQIGTVNSQGALPGMVWQNRDVYLQGPIWAKIPHTDGNFHPSPLMGGFGLKHPPPQILIKNTPVPADPPTTFNQSKLNSFITQYSTGQVSVEIEWELQKENSKRWNPEIQYTSNYYKSTSVDFAVNTEGVYSEPHPIGTRYLTRPL

SEQ ID NO: 3455 - protein, 736 aa, Artificial Sequence
  Synthetic polypeptide
MAADGYLPDWLEDNLSEGIREWWDLKPGAPKPKANQQKQDDGRGLVLPGYKYLGPFNGLDKGEPVNAADAAALEHDKAYDQQLKAGDNPYLRYNHADAEFQERLQEDTSFGGNLGRAVFQAKKRLLEPLGLVEEAAKTAPGKKRPVEQSPQEPDSSAGIGKSGAQPAKKRLNFGQTGDTESVPDPQPIGEPPAAPSGVGPNTMAAGGGAPMADNNEGADGVGSSSGNWHCDSQWLGDRVITTSTRTWALPTYNNHLYKQISSASTGASNDNHYFGYSTPWGYFDFNRFHCHFSPRDWQRLINNNWGFRPKRLNFKLFNIQVKEVTQNEGTKTIANNLTSTIQVFTDSEYQLPYVLGSAHQGCLPPFPADVFMIPQYGYLTLNNGSQAVGRSSFYCLEYFPSQMLRTGNNFQFTYTFEDVPFHSSYAHSQSLDRLMNPLIDQYLYYLSRTQTTGGTANTQTLGFSQGGPNTMANHAKNWLPGPCYRQQRVSTTTGQNNNSNFAWTAGTKYHLNGRNSLANPGIAMATHKDDKERFFPSNGILIFGKQNAARDNADYSDVMLTSEEEIKTTNPVATEEYGIVADNLQQQNTAPQIGTVNSQGALPGMVWQNRDVYLQGPIWAKIPHTDGNFHPSPLMGGFGLKHPPPQILIKNTPVPADPPTTFNQSKLNSFITQYSTGQVSVEIEWELQKENSKRWNPEIQYTSNYYKSTSVDFAVNTEGVYSEPHPIGTRYLTRPL

SEQ ID NO: 3456 - protein, 737 aa, Artificial Sequence; identical to SEQ ID NO: 3438
  Synthetic polypeptide

SEQ ID NO: 3457 - protein, 737 aa, Artificial Sequence
  Synthetic polypeptide
MAADGYLPDWLEDNLSEGIREWWALKPGAPKPKANQQKQDDGRGLVLPGYKYLGPFNGLDKGEPVNAADAAALEHDKAYDQQLKAGDNPYLRYNHADAEFQERLKEDTSFGGNLGRAVFQAKKRVLEPFGLVEEGAKTAPGKKRPVEQSPQEPDSSSGIGKTGQQPAKKRLNFGQTGDSESVPDPQPLGEPPAAPSGVGPNTMAAGGGAPMADNNEGADGVGSSSGNWHCDSQWLGNRVITTSTRTWALPTYNNHLYKQISNSTSGGSSNDNAYFGYSTPWGYFDFNRFHCHFSPRDWQRLINNNWGFRPKRLNFKLFNIQVKEVTDNNGVKTIANNLTSTVQVFTDSEYQLPYVLGSAHQGCLPPFPADVFMIPQYGYLTLNNGSQAVGRSSFYCLEYFPSQMLRTGNNFQFTYTFEDVPFHSSYAHSQSLDRLMNPLIDQYLYYLSRTQTTGGTANTQTLGFSQGGPNTMANQAKNWLPGPCYRQQRVSTTTGQNNNSNFAWTAGTKYHLNGRNSLANPGIAMATHKDDKERFFPSNGILIFGKQNAARDNADYSDVMLTSEEEIKTTNPVATEEYGIVADNLQQQNTAPQIGTVNSQGALPGMVWQNRDVYLQGPIWAKIPHTDGNFHPSPLMGGFGLKHPPPQILIKNTPVPADPPTTFNQSKLNSFITQYSTGQVSVEIEWELQKENSKRWNPEIQYTSNYYKSTSVDFAVNTEGVYSEPHPIGTRYLTRPL

SEQ ID NO: 3458 - protein, 736 aa, Artificial Sequence
  Synthetic polypeptide
MAADGYLPDWLEDNLSEGIREWWDLKPGAPKPKANQQKQDDGRGLVLPGYKYLGPFNGLDRGEPVNAADAAALEHDKAYDQQLKAGDNPYLRYNHADAEFQERLQEDTSFGGNLGRAVFQAKKRVLEPLGLVEEGAKTAPGKKRPVEQSPQEPDSSSGIGKTGQQPAKKRLNFGQTGDSESVPDPQPLGEPPATPAAVGPTTMASGGGAPMADNNEGADGVGNASGNWHCDSTWLGDRVITTSTRTWALPTYNNHLYKQISSASTGASNDNHYFGYSTPWGYFDFNRFHCHFSPRDWQRLINNNWGFRPKRLNFKLFNIQVKEVTDNNGVKTIANNLTSTIQVFTDSEYQLPYVLGSAHQGCLPPFPADVFMIPQYGYLTLNNGSQAVGRSSFYCLEYFPSQMLRTGNNFQFTYTFEDVPFHSSYAHSQSLDRLMNPLIDQYLYYLSRTQTTGGTANTQTLGFSQGGPNTMANQAKNWLPGPCYRQQRVSTTTGQNNNSNFAWTAGTKYHLNGRNSLANPGIAMATHKDDKERFFPSNGILIFGKQNAARDNADYSDVMLTSEEEIKTTNPVATEEYGIVADNLQQQNTAPQIGTVNSQGALPGMVWQNRDVYLQGPIWAKIPHTDGNFHPSPLMGGFGLKHPPPQILIKNTPVPADPPTTFNQSKLNSFITQYSTGQVSVEIEWELQKENSKRWNPEIQYTSNYYKSTSVDFAVNTEGVYSEPHPIGTRYLTRPL

SEQ ID NO: 3459 - protein, 736 aa, Artificial Sequence
  Synthetic polypeptide
MAADGYLPDWLEDNLSEGIREWWDLKPGAPKPKANQQKQDDGRGLVLPGYKYLGPFNGLDKGEPVNAADAAALEHDKAYDQQLKAGDNPYLRYNHADAEFQERLQEDTSFGGNLGRAVFQAKKRVLEPLGLVEEGAKTAPGKKRPVEQSPQEPDSSSGIGKKGQQPARKRLNFGQTGDSESVPDPQPLGEPPAAPSGVGSLTMASGGGAPMADNNEGADGVGNASGNWHCDSTWLGDRVITTSTRTWALPTYNNHLYKQISSASTGASNDNHYFGYSTPWGYFDFNRFHCHFSPRDWQRLINNNWGFRPKRLNFKLFNIQVKEVTQNEGTKTIANNLTSTVQVFTDSDYQLPYVLGSAHQGCLPPFPADVFMIPQYGYLTLNNGSQAVGRSSFYCLEYFPSQMLRTGNNFQFTYTFEDVPFHSSYAHSQSLDRLMNPLIDQYLYYLSRTQTTGGTANTQTLGFSQGGPNTMANQAKNWLPGPCYRQQRVSTTTGQNNNSNFAWTAGTKYHLNGRNSLSNPGIAMATHKDDKERFFPSNGILIFGKQNAARDNADYSDVMLTSEEEIKTTNPVATEEYGIVADNLQQQNTAPQIGTVNSQGALPGMVWQNRDMYLQGPIWAKIPHTDGNFHPSPLMGGFGLKHPPPQILIKNTPVPADPPTTFNQSKLNSFITQYSTGQVSVEIEWELQKENSKRWNPEIQYTSNYYKSTSVDFAVNTEGVYSEPHPIGTRYLTRPL

SEQ ID NO: 3460 - protein, 736 aa, Artificial Sequence
  Synthetic polypeptide
MAADGYLPDWLEDNLSEGIREWWALKPGAPKPKANQQKQDDGRGLVLPGYKYLGPFNGLDKGEPVNAADAAALEHDKAYDQQLKAGDNPYLRYNHADAEFQERLQEDTSFGGNLGRAVFQAKKRVLEPFGLVEEGAKTAPGKKRPVEQSPQEPDSSSGIGKTGQQPAKKRLNFGQTGGSESVPDPQPLGEPPATPAAVGPTTMAAGGGAPMADNNEGADGVGSSSGNWHCDSTWLGDRVITTSTRTWALPTYNNHLYKQISSASTGASNDNHYFGYSTPWGYFDFNRFHCHFSPRDWQRLINNNWGFRPKRLNFKLFNIQVKEVTDNNGVKTIANNLTSTVQVFTDSEYQLPYVLGSAHQGCLPPFPADVFMIPQYGYLTLNNGSQAVGRSSFYCLEYFPSQMLRTGNNFTFSYTFEEVPFHSSYAHSQSLDRLMNPLIDQYLYYLSRTQTTGGTANTQTLGFSQGGPNTMANQAKNWLPGPCYRQQRVSTTTGQNNNSNFAWTAGTKYHLNGRNSLANPGIAMASHKDDKERFFPSNGILIFGKQNAARDNADYSDVMLTSEEEIKTTNPVATEEYGIVADNLQQQNTAPQIGTVNSQGALPGMVWQNRDVYLQGPIWAKIPHTDGNFHPSPLMGGFGLKHPPPQILIKNTPVPADPPTTFNQSKLNSFITQYSTGQVSVEIEWELQKENSKRWNPEIQYTSNYYKSTSVDFAVNTEGVYSEPHPIGTRYLTRPL

SEQ ID NO: 3461 - DNA, 2211 bp, Artificial Sequence
  Synthetic polynucleotide
atggctgccgatggttatcttccagattggctcgaggacaacctctctgagggcattcgcgagtggtgggacttgaaacctgcatccccgaaacccaaagccaaccagcaaaagcaggacgacggccggggtctggtgcttcctggctacaagtacctcggacccttcaacggactcgacaagggggagcccgtcaacgcggcggacgcagcggccctcgagcacgacaaggcctacgaccagcagctcaaagcgggtgacaatccgtacctgcggtataaccacgccgacgccgagtttcaggagcgtctgcaagaagatacgtcttttgggggcaacctcgggcgagcagtcttccaggccaaaaagaggcttcttgaacctcttggtctggttgaggaagcggctaagacggctcctggaaagaagaggcctgtagagcagtctcctcaggaaccggactcctccgcgggtattggcaaatcgggtgcacagcccgccaaaaagagactcaatttcggtcagactggcggcacagagtcagttccagaccctcaacctctcggagaacctccagcagcgccctctggtgtgggacctaatacaatggctgcaggcggtggcgcaccaatggcagacaataacgaaggcgccgacggagtgggtagttcctcgggaaattggcattgcgattccacatggctgggcgacagagtcatcaccaccagcaccagaacctgggccctgcccacttacaacaaccatctctacaagcaaatctccagtgcttcaacgggggccagcaacgacaaccactacttcggctacagcaccccctgggggtattttgatttcaacagattccactgccacttctcaccacgtgactggcagcgactcatcaacaacaactggggattccggcccaagagactcagcttcaagctcttcaacatccaggtcaaggaggtcacgcagaatgaaggcaccaagaccatcgccaataacctcaccagcaccatccaggtgtttacggactcggagtaccagctgccgtacgttctcggctctgcccaccagggctgcctgcctccgttcccggcggacgtgttcatgattccccagtacggatacctaacactcaacaacggtagtcaggccgtgggacgctcctccttctactgcctggaatactttccttcgcagatgctgagaaccggcaacaacttccagtttacttacaccttcgaggacgtgcctttccacagcagctacgcccacagccagagcttggaccggctgatgaatcctctgattgaccagtacctgtactacttgtctcggactcaaacaacaggaggcacggcaaatacgcagactctgggcttcagccaaggtgggcctaatacaatggccaatcaggcaaagaactggctgccaggaccctgttaccgccaacaacgcgtctcaacgacaaccgggcaaaacaacaatagcaactttgcctggactgctgggaccaaataccatctgaatggaagaaattcattggctaatcctggcatcgctatggcaacacacaaagacgacaaggagcgtttttttcccagtaacgggatcctgatttttggcaaacaaaatgctgccagagacaatgcggattacagcgatgtcatgctcaccagcgaggaagaaatcaaaaccactaaccctgtggctacagaggaatacggtatcgtggcagataacttgcagcagcaaaacacggctcctcaaattggaactgtcaacagccagggggccttacccggtatggtctggcagaaccgggacgtgtacctgcagggtcccatctgggccaagattcctcacacggacggcaacttccacccgtctccgctgatgggcggctttggcctgaaacatcctccgcctcagatcctgatcaagaacacgcctgtacctgcggatcctccgaccaccttcaaccagtcaaagctgaactctttcatcacgcaatacagcaccggacaggtcagcgtggaaattgaatgggagctgcagaaggaaaacagcaagcgctggaaccccgagatccagtacacctccaactactacaaatctacaagtgtggactttgctgttaatacagaaggcgtgtactctgaaccccaccccattggcacccgttacctcacccgtcccctgtaa

SEQ ID NO: 3462 - DNA, 2211 bp, Artificial Sequence
  Synthetic polynucleotide
atggctgccgatggttatcttccagattggctcgaggacaacctctctgagggcattcgcgagtggtgggacttgaaacctggagccccgaaacccaaagccaaccagcaaaagcaggacgacggccggggtctggtgcttcctggctacaagtacctcggacccttcaacggactcgacaagggggagcccgtcaacgcggcggacgcagcggccctcgagcacgacaaggcctacgaccagcagctcaaagcgggtgacaatccgtacctgcggtataaccacgccgacgccgagtttcaggagcgtctgcaagaagatacgtcttttgggggcaacctcgggcgagcagtcttccaggccaagaagagggttctcgaaccttttggtctggttgaggaaggcgctaagacggctcctggaaagaaacgtccggtagagcagtcgccacaagagccagactcctcctcgggcattggcaagacaggccagcagcccgctaaaaagagactcaattttggtcagactggcgactcagagtcagtccccgacccacaacctctcggagaacctccagcaacccccgctgctgtgggacctactacaatggcttcaggtggtggcgcaccaatggcagacaataacgaaggcgccgacggagtgggtaatgcctcaggaaattggcattgcgattcccaatggctgggggacagagtcatcaccaccagcacccgaacctgggccctgcccacctacaacaatcacctctacaagcaaatctccagtgcttcaacgggggccagcaacgacaaccactacttcggctacagcaccccctgggggtattttgatttcaacagattccactgccatttctcaccacgtgactggcagcgactcatcaacaacaattggggattccggcccaagagactcaacttcaaactcttcaacatccaagtcaaggaggtcacgcagaatgaaggcaccaagaccatcgccaataacctcaccagcaccatccaggtgtttacggactcggagtaccagctgccgtacgttctcggctccgcccaccagggctgcctgcctccgttcccggcggacgtgttcatgattccccagtacggctacctaacactcaacaacggtagtcaggccgtgggacgctcctccttctactgcctggaatactttccttcgcagatgctgagaaccggcaacaacttccagtttacttacaccttcgaggacgtgcctttccacagcagctacgcccacagccagagcttggaccggctgatgaatcctctgattgaccagtacctgtactacttgtctcggactcaaacaacaggaggcacggcaaatacgcagactctgggcttcagccaaggtgggcctaatacaatggccaatcaggcaaagaactggctgccaggaccctgttaccgccaacaacgcgtctcaacgacaaccgggcaaaacaacaatagcaactttgcctggactgctgggaccaaataccatctgaatggaagaaattcattggctaatcctggcatcgctatggcaacacacaaagacgacaaggagcgtttttttcccagtaacgggatcctgatttttggcaaacaaaatgctgccagagacaatgcggattacagcgatgtcatgctcaccagcgaggaagaaatcaaaaccactaaccctgtggctacagaggaatacggtatcgtggcagataacttgcagcagcaaaacacggctcctcaaattggaactgtcaacagccagggggccttacccggtatggtctggcagaaccgggacgtgtacctgcagggtcccatctgggccaagattcctcacacggacggcaacttccacccgtctccgctgatgggcggctttggcctgaaacatcctccgcctcagatcctgatcaagaacacgcctgtacctgcggatcctccgaccaccttcaaccagtcaaagctgaactctttcatcacgcaatacagcaccggacaggtcagcgtggaaattgaatgggagctgcagaaggaaaacagcaagcgctggaaccccgagatccagtacacctccaactactacaaatctacaagtgtggactttgctgttaatacagaaggcgtgtactctgaaccccaccccattggcacccgttacctcacccgtcccctgtaa

SEQ ID NO: 3463 - DNA, 2211 bp, Artificial Sequence
  Synthetic polynucleotide
atggctgccgatggttatcttccagattggctcgaggacaacctctctgagggcattcgcgagtggtgggacttggaacctggagccccgaagcccaaagccaaccagcaaaagcaggacgacggccggggtctggtgcttcctggctacaagtacctcggacccttcaacggactcgacaagggggagcccgtcaacgcggcggacgcagcggccctcgagcacgacaaggcctacgaccagcagctcaaagcgggtgacaatccgtacctgcggtataaccacgccgacgccgagtttcaggagcgtctgcaagaagatacgtcttttgggggcaacctcgggcgagcagtcttccaggccaagaagcgggttctcgaacctctcggtctggttgaggaaggcgctaagacggctcctggaaagaaacgtccggtagagcagtcgccacaagagccagactcctcctcgggcatcggcaagacaggccagcagcccgctaaaaagagactcaattttggtcagactggcgactcagagtcagtccccgatccacaacctctcggagaacctccagcaacccccgctgctgtgggacctactacaatggcttcaggcggtggcgcaccaatggcagacaataacgaaggcgccgacggagtgggtaatgcctcaggaaattggcattgcgattccacatggctgggcgacagagtcatcaccaccagcacccgcacctgggccttgcccacctacaataaccacctctacaagcaaatctccagtgcttcaacaggggccagcaacgacaaccactacttcggctacagcaccccctgggggtattttgacttcaacagattccactgccacttctcaccacgtgactggcagcgactcatcaacaacaactggggattccggcctaagcgactcaacttcaagctcttcaacattcaggtcaaagaggttacggacaacaatggagtcaagaccatcgccaataaccttaccagcacggtccaggtcttcacggactcggagtaccagttgccgtacgtcctcggctctgcgcaccagggctgcctccctccgttcccggcggacgtgttcatgattccgcagtacggctacctaacgctcaacaacggtagtcaggccgtgggacgctcctccttctactgcctggaatactttccttcgcagatgctgagaaccggcaacaacttccagtttacttacaccttcgaggacgtgcctttccacagcagctacgcccacagccagagcttggaccggctgatgaatcctctgattgaccagtacctgtactacttgtctcggactcaaacaacaggaggcacggcaaatacgcagactctgggcttcagccaaggtgggcctaatacaatggccaatcaggcaaagaactggctgccaggaccctgttaccgccaacaacgcgtctcaacgacaaccgggcaaaacaacaatagcaactttgcctggactgctgggaccaaataccatctgaatggaagaaattcattggctaatcctggcatcgctatggcaacacacaaagacgacaaggagcgtttttttcccagtaacgggatcctgatttttggcaaacaaaatgctgccagagacaatgcggattacagcgatgtcatgctcaccagcgaggaagaaatcaaaaccactaaccctgtggctacagaggaatacggtatcgtggcagataacttgcagcagcaaaacacggctcctcaaattggaactgtcaacagccagggggccttacccggtatggtctggcagaaccgggacgtgtacctgcagggtcccatctgggccaagattcctcacacggacggcaacttccacccgtctccgctgatgggcggctttggcctgaaacatcctccgcctcagatcctgatcaagaacacgcctgtacctgcggatcctccgaccaccttcaaccagtcaaagctgaactctttcatcacgcaatacagcaccggacaggtcagcgtggaaattgaatgggagctgcagaaggaaaacagcaagcgctggaaccccgagatccagtacacctccaactactacaaatctacaagtgtggactttgctgttaatacagaaggcgtgtactctgaaccccaccccattggcacccgttacctcacccgtcccctgtaa

SEQ ID NO: 3464 - DNA, 2211 bp, Artificial Sequence
  Synthetic polynucleotide
atggctgccgatggttatcttccagattggctcgaggacactctctctgaaggaataagacagtggtggaagctcaaacctggcccaccaccaccaaagcccgcagagcggcataaggacgacagcaggggtcttgtgcttcctgggtacaagtacctcggacccttcaacggactcgacaagggagagccggtcaacgaggcagacgccgcggccctcgagcacgacaaagcctacgaccggcagctcgacagcggagacaacccgtacctcaagtacaaccacgccgacgcggagtttcaggagcgccttaaagaagatacgtcttttgggggcaacctcgggcgagcagtcttccaggccaagaagagggttctcgaaccttttggtctggttgaggaaggtgctaagacggctcctggaaagaaacgtccggtagagcagtcgccacaagagccagactcctcctcgggcattggcaagacaggccagcagcccgctaaaaagagactcaattttggtcagactggcgactcagagtcagtccccgacccacaacctctcggagaacctccagcaacccccgctgctgtgggacctactacaatggcttcaggcggtggcgcaccaatggcagacaataacgaaggcgccgacggagtgggtaatgcctcaggaaattggcattgcgattccacatggctgggcgacagagtcatcaccaccagcacccgaacatgggccttgcccacctataacaaccacctctacaagcaaatctccagtgcttcaacgggggccagcaacgacaaccactacttcggctacagcaccccctgggggtattttgacttcaacagattccactgccacttctcaccacgtgactggcagcgactcatcaacaacaactggggattccggcctaagcgactcaacttcaagctcttcaacattcaggtcaaagaggttacggacaacaatggagtcaagaccatcgccaataaccttaccagcacggtccaggtcttcacggactcagactatcagctcccgtacgtgctcgggtcggctcacgagggctgcctcccgccgttcccagcggacgttttcatgattcctcagtacggctacctaacactcaacaacggtagtcaggccgtgggacgctcctccttctactgcctggaatactttccttcgcagatgctgagaaccggcaacaacttccagtttacttacaccttcgaggacgtgcctttccacagcagctacgcgcacagccagagtctggaccggctgatgaatcctctgattgaccagtacctgtactacttgtctcggactcaaacaacaggaggcacggcaaatacgcagactctgggcttcagccaaggtgggcctaatacaatggccaatcaggcaaagaactggctgccaggaccctgttaccgccaacaacgcgtctcaacgacaaccgggcaaaacaacaatagcaactttgcctggactgctgggaccaaataccatctgaatggaagaaattcattggctaatcctggcatcgctatggcaacacacaaagacgacaaggagcgtttttttcccagtaacgggatcctgattttcggcaaacaaaatgctgccagagacaatgcggattacagcgatgtcatgctcaccagcgaggaagaaatcaaaaccactaaccctgtggctacagaggaatacggtatcgtggcagataacttgcagcagcaaaacacggctcctcaaattggaactgtcaacagccagggggccttacccggtatggtctggcagaaccgggacgtgtacctgcagggtcccatctgggccaagattcctcacacggacggcaacttccacccgtctccgctgatgggcggctttggcctgaaacatcctccgcctcagatcctgatcaagaacacgcctgtacctgcggatcctccgaccaccttcaaccagtcaaagctgaactctttcatcacgcaatacagcaccggacaggtcagcgtggaaattgaatgggagctgcagaaggaaaacagcaagcgctggaaccccgagatccagtacacctccaactactacaaatctacaagtgtggactttgctgttaatacagaaggcgtgtactctgaaccccaccccattggcaccagatacctgactcgtaatctgtaa

SEQ ID NO: 3465 - DNA, 2208 bp, Artificial Sequence
  Synthetic polynucleotide
atggctgccgatggttatcttccagattggctcgaggacactctctctgaaggaataagacagtggtggaagctcaaacctggcccaccaccaccaaagcccgcagagcggcataaggacgacagcaggggtcttgtgcttcctgggtacaagtacctcggacccttcaacggactcgacaagggagagccggtcaacgaggcagacgccgcggccctcgagcacgacaaagcctacgaccggcagctcgacagcggagacaacccgtacctcaagtacaaccacgccgacgcggagtttcaggagcgccttaaagaagatacgtcttttgggggcaacctcggacgagcagtcttccaggcgaaaaagagggttcttgaacctctgggcctggttgaggaacctgttaagacggctccgggaaaaaagaggccggtagagcagtcgccacaagagccagactcctcctcgggcatcggcaagaaaggccagcagcccgctaaaaagagactcaattttggtcagactggcgactcagagtcagtccccgacccacaacctctcggagaacctccagcaacccccgctgctgtgggacctactacaatggcttcaggcggtggcgcaccaatggcggacaataacgaaggcgccgatggagtgggtaatgcctcaggaaattggcattgcgattccacatggctgggcgacagagtcatcaccaccagcacccgaacatgggccttgcccacctataacaaccacctctacaagcaaatctccagtgcttcaacgggggccagcaacgacaaccactacttcggctacagcaccccctgggggtattttgacttcaacagattccactgccacttctcaccacgtgactggcagcgactcatcaacaacaactggggattccggcctaagcgactcaacttcaagctcttcaacattcaggtcaaagaggttacggacaacaatggagtcaagaccatcgccaataaccttaccagcacggtccaggtcttcacggactcagactatcagctcccgtacgttctcggctctgcccaccagggctgcctgcctccgttcccggcggacgtgttcatgattccccagtacggctacctaacactcaacaacggtagtcaggccgtgggacgctcctccttctactgcctggaatactttccttcgcagatgctgagaaccggcaacaacttccagtttacttacaccttcgaggacgtgcctttccacagcagctacgcccacagccagagcttggaccggctgatgaatcctctgattgaccagtacctgtactacttgtctcggactcaaacaacaggaggcacggcaaatacgcagactctgggcttcagccaaggtgggcctaatacaatggccaatcaggcaaagaactggctgccaggaccctgttaccgccaacaacgcgtctcaacgacaaccgggcaaaacaacaatagcaactttgcctggactgctgggaccaaataccatctgaatggaagaaattcattggctaatcctggcatcgctatggcaacacacaaagacgacaaggagcgtttttttcccagtaacgggatcctgatttttggcaaacaaaatgctgccagagacaatgcggattacagcgatgtcatgctcaccagcgaggaagaaatcaaaaccactaaccctgtggctacagaggaatacggtatcgtggcagataacttgcagcagcaaaacacggctcctcaaattggaactgtcaacagccagggggccttacccggtatggtctggcagaaccgggacgtgtacctgcagggtcccatctgggccaagattcctcacacggacggcaacttccacccgtctccgctgatgggcggctttggcctgaaacatcctccgcctcagatcctgatcaagaacacgcctgtacctgcggatcctccgaccaccttcaaccagtcaaagctgaactctttcatcacgcaatacagcaccggacaggtcagcgtggaaattgaatgggagctgcagaaggaaaacagcaagcgctggaaccccgagatccagtacacctccaactactacaaatctacaagtgtggactttgctgttaatacagaaggcgtgtactctgaaccccaccccattggcacccgttacctcacccgtcccctg

SEQ ID NO: 3466 - DNA, 2211 bp, Artificial Sequence
  Synthetic polynucleotide
atggctgccgatggttatcttccagattggctcgaggacactctctctgaaggaataagacagtggtggaagctcaaacctggcccaccaccaccaaagcccgcagagcggcataaggacgacagcaggggtcttgtgcttcctgggtacaagtacctcggacccttcaacggactcgacaagggagagccggtcaacgaggcagacgccgcggccctcgagcacgacaaagcctacgaccagcagctccaagcgggtgacaatccgtacctgcggtataaccacgccgacgccgagtttcaggagcgtcttcaaggagatacgtcttttgggggcaacctcggacgagcagtcttccaggccaaaaagaggcttcttgaacctcttggtctggttgaggaagcggctaagacggctcctggaaagaagaggcctgtagagcagtctcctcaggaaccggactcctccgcgggtattggcaaatcgggtgcacagcccgctaaaaagagactcaatttcggtcagactggcgacacagagtcagtcccagaccctcaaccaatcggagaacctcccgcagccccctcaggtgtgggatctcttacaatggcttcaggtggtggcgcaccagtggcagacaataacgaaggtgccgatggagtgggtagttcctcgggaaattggcattgcgattcccaatggctgggggacagagtcatcaccaccagcacccgaacatgggccttgcccacctataacaaccacctctacaagcaaatctccagtgcttcaacgggggccagcaacgacaaccactacttcggctacagcaccccctgggggtattttgacttcaaccgcttccactgccacttctcaccacgtgactggcagcgactcatcaacaacaactggggattccggcccaagagactcagcttcaagctcttcaaccatccaggtcaaggaggtcacgcagaatgaaggcaccaagaccatcgccaataacctcaccagcacatccaggtgtttacggactcggagtaccagctgccgtacgttctcggctctgcccaccagggctgcctgcctccgttcccggcggacgtgttcatgattccccagtacggctacctaacactcaacaacggtagtcaggccgtgggacgctcctccttctactgcctggaatactttccttcgcagatgctgagaaccggcaacaacttccagttcacttacaccttcgaggacgtgcctttccacagcagctacgcgcacagccagagcttggaccggctgatgaatcctctgattgaccagtacctgtactacttgtctcggactcaaacaacaggaggcacggcaaatacgcagactctgggcttcagccaaggtgggcctaatacaatggccaatcaggcaaagaactggctgccaggaccctgttaccgccaacaacgcgtctcaacgacaaccgggcaaaacaacaatagcaactttgcctggactgctgggaccaaataccatctgaatggaagaaattcattgggtaatcctggcatcgctatggcaacacacaaagacgacaaggagcgtttttttcccagtaacgggatcctgatttttggcaaacaaaatgctgccagagacaatgcggattacagcgatgtcatgctcaccagcgaggaagaaatcaaaaccactaaccctgtggctacagaggaatacggtatcgtggcagataacttgcagcagcaaaacacggctcctcaaattggaactgtcaacagccagggggccttacccggtatggtctggcagaaccgggacgtgtacctgcagggtcccatctgggccaagattcctcacacggacggcaacttccacccgtctccgctgatgggcggctttggcctgaaacatcctccgcctcagatcctcatcaaaaacacacctgtacctgcggatcctccaacggccttcaaccagtcaaagctgaactctttcatcacgcaatacagcaccggacaggtcagcgtggaaattgaatgggagctgcagaaggaaaacagcaagcgctggaaccccgagatccagtacacctccaactactacaaatctacaagtgtggactttgctgttaatacagaaggcgtgtactctgaaccccaccccattggcacccgttacctcacccgtcccctgtaa

SEQ ID NO: 3467 - DNA, 2214 bp, Artificial Sequence
  Synthetic polynucleotide
atggctgccgatggttatcttccagattggctcgaggacaacctctctgagggcattcgcgagtggtgggacttgaaacatggagccccgaaacccaaagccaaccagcaaaagcaggacgacggccggggtctggtgcttcctggctacaagtacctcggacccttcaacggactcgacaagggggagcccgtcaacgcggcggatgcagcggccctcgagcacgacaaggcctacgaccagcagctcaaagcgggtgacaatccgtacctgcggtataaccacgccgacgccgagtttcaggagcgtctgcaagaagatacgtcttttgggggcaacctcgggcgagcagtcttccaggccaagaagagggttctcgaaccttttggtctggttgaggaaggtgctaagacggctcctggaaagaaacgtccggtagagcagtcgccacaagagccagactcctcctcgggcattggcaagacaggccagcagcccgctaaaaagagactcaattttggtcagactggcgactcagagtcagtccccgacccacaacctctcggagaacctccagcaacccccgctgctgtgggacctactacaatggcttcaggcggtggcgcaccaatggcagacaataacgaaggcgccgacggagtgggtaatgcctcaggaaattggcattgcgattccacatggctgggcgacagagtcatcaccaccagcacccgaacatgggccttgcccacctataacaaccacctctacaagcaaatctccaacgggacttcgggaggaagcaccaacgacaacacctacttcggctacagcaccccctgggggtattttgactttaacagattccactgccacttctcaccacgtgactggcagcgactcatcaacaacaactggggattccggcccaagagactcaacttcaaactcttcaacatccaagtcaaggaggtcacgcagaatgaaggcaccaagaccatcgccaataacctcaccagcaccatccaggtgtttacggactcggagtaccagctgccgtacgttctcggctccgcccaccagggctgcctgcctccgttcccggcggacgtgttcatgattccccagtacggctacctaacactcaacaacggtagtcaggccgtgggacgctcctccttctactgcctggaatactttccttcgcagatgctgagaacgggcaacaactttaccttcagctacacctttgaggacgttcctttccacagcagctacgctcacagccagagtctggaccgtctcatgaatcctctgattgaccagtacctgtactacttgtctcggactcaaacaacaggaggcacggcaaatacgcagactctgggcttcagccaaggtgggcctaatacaatggccaatcaggcaaagaactggctgccaggaccctgttaccgccaacaacgcgtctcaacgacaaccgggcaaaacaacaatagcaactttgcctggactgctgggaccaaataccatctgaatggaagaaattcattggctaatcctggcatcgctatggcaacacacaaagacgacaaggagcgtttttttcccagtaacgggatcctgatttttggcaaacaaaatgctgccagagacaatgcggattacagcgatgtcatgctcaccagcgaggaagaaatcaaaaccactaaccctgtggctacagaggaatacggtatcgtggcagataacttgcagcagcaaaacacggctcctcaaattggaactgtcaacagccagggggccttacccggtatggtctggcagaaccgggacgtgtacctgcagggtcccatctgggccaagattcctcacacggacggcaacttccacccgtctccgctgatgggcggctttggcctgaaacatcctccgcctcagatcctgatcaagaacacgcctgtacctgcggatcctccgaccaccttcaaccagtcaaagctgaactctttcatcacgcaatacagcaccggacaggtcagcgtggaaattgaatgggagctgcagaaggaaaacagcaagcgctggaaccccgagatccagtacacctccaactactacaaatctacaagtgtggactttgctgttaatacagaaggcgtgtactctgatccccaccccattggcacccgttacctcacccgtcccctgtaa

SEQ ID NO: 3468 - DNA, 2214 bp, Artificial Sequence
  Synthetic polynucleotide
atggctgccgatggttatcttccagattggctcgaggacaacctctctgagggcattcgcgagtggtgggcgctgaaacctggagccccgaagcccaaagccaaccagcaaaagcaggacgacggccggggtctggtgcttcctggctacaagtacctcggacccttcaacggactcgacaaaggagagccggtcaacgaggcggacgcggcagccctcgaacacgacaaggcctacgaccagcagctcaaagcgggtgacaatccgtacctgcggtataaccacgccgacgccgagtttcaggagcgtctgcaagaagatacgtcttttgggggcaacctcgggcgagcagtcttccaggccaagaagcgggttctcgaacctctcggtctggttgaggaaggcgctaagacggctcctggaaagaagagaccggtagagccatcaccccagcgttctccagactcctctacgggcatcggcaagaaaggccagcagcccgccagaaaaagactcaattttggtcagactggcgactcagagtcagttccagaccctcaacctctcggagaacctccagcagcgccctctggtgtgggacctaatacaatggcttcaggcggtggcgcaccaatggcagacaataacgagggcgccgacggagtgggtaattcctcgggaaattggcattgcgattccacatggatgggcgacagagtcatcaccaccagcacccgaacctgggccctgcccacctacaacaaccacctctacaagcaaatctccagtgcttcaacgggggccagcaacgacaaccactacttcggctacagcaccccctgggggtattttgactttaacagattccactgccacttttcaccacgtgactggcagcgactcatcaacaacaactggggattccggcccaagagactcaacttcaagctcttcaacatccaagtcaaggaggtcacgcagaatgaaggcaccaagaccatcgccaataacctcaccagcaccatccaggtgtttacggactcggagtaccagctgccgtacgttctcggctctgcccaccagggctgcctgcctccgttcccggcggacgtgttcatgattccccagtacggctacctaacactcaacaacggtagtcaggccgtgggacgctcctccttctactgcctggaatactttccttcgcagatgctgagaaccggcaacaacttccagtttacttacaccttcgaggacgtgcctttccacagcagctacgcgcacagccagagcttggaccggctgatgaatcctctgattgaccagtacctgtactacttgtctcggactcaaacaacaggaggcacggcaaatacgcagactctgggcttcagccaaggtgggcctaatacaatggccaatcaggcaaagaactggctgccaggaccctgttaccgccaacaacgcgtctcaacgacaaccgggcaaaacaacaatagcaactttgcctggactgctgggaccaaataccatctgaatggaagaaattcattggctaatcctggcatcgctatggcaacacacaaagacgacaaggagcgtttttttcccagtaacgggatcctgatttttggcaaacaaaatgctgccagagacaatgcggattacagcgatgtcatgctcaccagcgaggaagaaatcaaaaccactaaccctgtggctacagaggaatacggtatcgtggcagataacttgcagcagcaaaacacggctcctcaaattggaactgtcaacagccagggggccttacccggtatggtctggcagaaccgggacgtgtacctgcagggtcccatctgggccaagattcctcacacggacggcaacttccacccgtctccgctgatgggcggctttggcctgaaacatcctccgcctcagatcctgatcaagaacacgcctgtacctgcggatcctccgaccaccttcaaccagtcaaagctgaactctttcatcacacaatacagcaccggacaggtcagcgtggaaattgaatgggagctgcagaaggaaaacagcaagcgctggaaccccgagatccagtacacctccaactactacaaatctacaagtgtggactttgctgttaatacagaaggcgtgtactctgaaccccaccccattggcacccgttacctcacccgtcccctgtaa

SEQ ID NO: 3469 - DNA, 2211 bp, Artificial Sequence
  Synthetic polynucleotide
  modified_base (676)..(676): a, c, g, or t
  misc_feature (676)..(676): n is a, c, g, or t
atggctgccgatggttatcttccagattggctcgaggacactctctctgaaggaataagacagtggtggaagctcaaacctggcccaccaccaccaaagcccgcagagcggcataaggacgacagcaggggtcttgtgcttcctgggtacaagtacctcggacccttcaacggactcgacaagggagagccggtcaacgaggcagacgccgcggccctcgagcacgacaaagcctacgaccggcagctcgacagcggagacaacccgtacctcaagtacaaccacgccgacgcggagtttcaggagcgccttaaagaagatacgtcttttgggggcaacctcggacgagcagtcttccaggcgaaaaagagggttcttgaacctctgggcctggttgaggaacctgttaagacggctccgggaaaaaagaggccggtagagcagtcgccacaagagccagactcctcctcgggcatcggcaagaaaggccagcagcccgctaaaaagagactcaattttggtcagactggcgactcagagtcagtccccgacccacaacctctcggagaacctccagcaacccccgctgctgtgggacctactacaatggcttcaggcggtggcgcaccaatggcggacaataacgaaggcgccgatggagtgggtaatgcctcangaaattggcattgcgattccacatggctgggcgacagagtcatcaccaccagcacccgaacatgggccttgccacctataacaaccacctctacaagcaaatctccagtgcttcaacgggggcgcagcaacgacaaccactacttcggctacagcaccccctgggggtattttgacttcaacagattccactgccacttctcaccacgtgactggcagcgactcatcaacaacaactggggattccggcctaagcgactcaacttcaagctcttcaacattcaggtcaaagaggttacggacaacaatggagtcaagaccatcgccaataaccttaccagcacggtccaggtcttcacggactcagactatcagctcccgtacgttctcggctctgcccaccagggctgcctgcctccgttcccggcggacgtgttcatgattccccagtacggctacctaacactcaacaacggtagtcaggccgtgggacgctcctccttctactgcctggaatactttccttcgcagatgctgagaaccggcaacaacttccagtttacttacaccttcgaggacgtgcctttccacagcagctacgcccacagccagagcttggaccggctgatgaatcctctgattgaccagtacctgtactacttgtctcggactcaaacaacaggaggcacggcaaatacgcagactctgggcttcagccaaggtgggcctaatacaatggccaatcaggcaaagaactggctgccaggaccctgttaccgccaacaacgcgtctcaacgacaaccgggcaaaacaacaatagcaactttgcctggactgctgggaccaaataccatctgaatggaagaaattcattggctaatcctggcatcgctatggcaacacacaaagacgacaaggagcgtttttttcccagtaacgggatcctgatttttggcaaacaaaatgctgccagagacaatgcggattacagcgatgtcatgctcaccagcgaggaagaaatcaaaaccactaaccctgtggctacagaggaatacggtatcgtggcagataacttgcagcagcaaaacacggctcctcaaattggaactgtcaacagccagggggccttacccggtatggtttggcagaaccgggacgtgtacctgcagggtcccatctgggccaagattcctcacacggacggcaacttccacccgtctccgctgatgggcggctttggcctgaaacatcctccgcctcagatcctgatcaagaacacgcctgtacctgcggatcctccgaccaccttcaaccagtcaaagctgaactctttcatcacacagtactccacgggacaggtcagcgtggaaattgaatgggagctgcagaaggaaaacagcaagcgctggaacccggagatccagtacacttccaactactacaaatctacaaatgtggactttgctgttaacacagaaggcgtgtactctgaaccccaccccattggcacccgttacctcacccgtcccctgtaa

SEQ ID NO: 3470 - DNA, 2211 bp, Artificial Sequence
  Synthetic polynucleotide
  modified_base (715)..(715): a, c, g, or t
  misc_feature (715)..(715): n is a, c, g, or t
atggctgccgatggttatcttccagattggctcgaggacaacctctctgagggcattcgcgagtggtgggacttgaaacctggagccccgaaacccaaagccaaccagcaaaagcaggacgacggccggggtctggtgcttcctggctacaagtacctcggacccttcaacggactcgacaagggggagcccgtcaacgcggcggatgcagcggccctcgagcacgacaaggcctacgaccagcagctccaagcgggtgacaatccgtacctgcggtataaccacgccgacgccgagtttcaggagcgtcttcaaggagatacgtcttttgggggcaacctcggacgagcagtcttccaggccaagaagcgggttctcgaacctctcggtctggttgaggaagcggctaagacggctcctggaaagaagaggcctgtagagcagtctcctcaggaaccggactcctccgcgggtattggcaaatcgggtgcacagcccgctaaaaagagactcaatttcggtcagactggcgacacagagtcagtcccagaccctcaaccaatcggagaacctcccgcagccccctctggtgtgggacctaatacaatggctgcaggcggtggcgcaccaatggcagacaataacgaaggcgccgatggagtgggtagttcctcgggaaattggcattgcgattccacatggctgggcgacagantcatcaccaccagcacccgaacctgggccctgcccacctataacaaccatctctacaagcaaatctccagtgcttcaacgggggccagcaacgacaaccactacttcggctacagcaccccctgggggtattttgacttcaacagattccactgccacttctcaccacgtgactggcagcgactcatcaacaacaactggggattccggcctaagcgactcaacttcaagctcttcaacattcaggtcaaagaggttacggacaacaatggagtcaagaccatcgccaataaccttaccagcacggtccaggtcttcacggactcggagtaccagttgccgtacgtcctcggctctgcgcaccagggctgcctgcctccgttcccggcggacgtgttcatgattccgcagtacggctacctaacgctcaacaatggcagccaggcagtgggacggtcatccttttactgcctggaatatttcccatcgcagatgctgagaacgggcaacaactttaccttcagctacacttttgaggacgttcctttccacagcagctacgctcacagccagagtctggaccgtctcatgaatcctctgattgaccagtacctgtactacttgtctcggactcaaacaacaggaggcacggcaaatacgcagactctgggcttcagccaaggtgggcctaatacaatggccaatcaggcaaagaactggctgccaggaccctgttaccgccaacaacgcgtctcaacgacaaccggacaaaacaacaatagcaactttgcctggactgctgggaccaaataccatctgaatggaagaaattcattggctaatcctggcatcgctatggcaacacacaaagacgacaaggagcgtttttttcccagtaacgggatcctgatttttggcaaacaaaatgctgccagagacaatgcggattacagcgatgtcatgctcaccagcgaggaagaaatcaaaaccactaaccctgtggctacagaggaatacggtatcgtggcagataactttcagcagcaaaacacggctcctcaaattggaactgtcaacagccagggggccttacccggtatggtctggcagaaccgggacgtgtacctgcagggtcccatctgggccaagattcctcacacggacggcaacttccacccgtctccgctgatgggcggctttggcctgaaacatcctccgcctcagatcctgatcaagaacacgcctgtacctgcggatcctccgaccaccttcaaccagtcaaagctgaactctttcatcacgcaatacagcaccggacaggtcagcgtggaaattgaatgggagctgcagaaggaaaacagcaagcgctggaaccccgagatccagtacacctccaactactacaaatctacaagtgtggactttgctgttaatacagaaggcgtgtactctgaaccccaccccattggcacccgttacctcacccgtcccctgtaa

SEQ ID NO: 3471 - DNA, 2211 bp, Artificial Sequence
  Synthetic polynucleotide
atggctgccgatggttatcttccagattggctcgaggacaacctctctgagggcattcgcgagtggtgggcgctgaaacctggagccccgaagcccaaagccaaccagcaaaagcaggacgacggccggggtctggtgcttcctggctacaagtacctcggacccttcaacggactcgacaaaggagagccggtcaacgaggcggacgcggcagccctcgaacacgacaaagcttacgaccagcagctcaaggccggtgacaacccctacctcaagtataaccacgccgacgccgagtttcaggagcgtctgcaagaagatacgtcttttgggggcaacctcgggcgagcagtcttccaggccaaaaagaggcttcttgaacctcttggtctggttgaggaagcggctaagacggctcctggaaagaagaggcctgtagagcagtctcctcaggaaccggactcctccgcgggtattggcaaatcgggtgcacagcccgctaaaaagagactcaatttcggtcagactggcgacacagagtcagtcccagacccacaacctctcggagaacctccagcaacccccgctgctgtgggacctactacaatggcttcaggcggtggcgcaccaatggcggacaataacgaaggcgccgatggagtgggtaatgcctcaggaaattggcattgcgattccacatggctgggcgacagagtcatcaccaccagcacccgaacatgggccttgcccacctataacaaccacctctacaagcaaatctccagtgcttcaacgggggccagcaacgacaaccactacttcggctacagcaccccctgggggtattttgacttcaacagattccactgccacttctcaccacgtgactggcagcgactcatcaacaacaactggggattccggcccaagagactcagcttcaagctcttcaacatccaggtcaaggaggtcacgcagaatgaaggcaccaagaccatcgccaataacctcaccagcaccatccaggtgtttacggactcggagtaccagctgccgtacgttctcggctccgcccaccagggctgcctgcctccgttcccggcggacgtgttcatgattccccagtacggctacctaacactcaacaacggtagtcaggccgtgggacgctcctccttctactgcctggaatactttccttcgcagatgctgagaaccggcaacaacttccagtttacttacaccttcgaggacgtgcctttccacagcagctacgcccacagccagagcttggaccggctgatgaatcctctgattgaccagtacctgtactacttgtctcggactcaaacaacaggaggcacggcaaatacgcagactctgggcttcagccaaggtgggcctaatacaatggccaatcaggcaaagaactggctgccaggaccctgttaccgccaacaacgcgtctcaacgacaaccgggcaaaacaacaatagcaactttgcctggactgctgggaccaaataccatctgaatggaagaaattcattggctaatcctggcatcgctatggcaacacacaaagacgacaaggagcgtttttttcccagtaacgggatcctgatttttggcaaacaaaatgctgccagagacaatgcggattacagcgatgtcatgctcaccagcgaggaagaaatcaaaaccactaaccctgtggctacagaggaatacggtatcgtggcagataacttgcagcagcaaaacacggctcctcaaattggaactgtcaacagccagggggccttacccggtatggtctggcagaaccgggacgtgtacctgcagggtcccatctgggccaagattcctcacacggacggcaacttccacccgtctccgctgatgggcggctttggcctgaaacatcctccgcctcagatcctgatcaagaacacgcctgtacctgcggatcctccgaccaccttcaaccagtcaaagctgaactctttcatcacgcaatacagcaccggacaggtcagcgtggaaattgaatgggagctgcagaaggaaaacagcaagcgctggaaccccgagatccagtacacctccaactactacaaatctacaagtgtggactttgctgttaatacagaaggcgtgtactctgaaccccaccccattggcacccgttacctcacccgtcccctgtaa

SEQ ID NO: 3472 - DNA, 2211 bp, Artificial Sequence
  Synthetic polynucleotide
atggctgccgatggttatcttccagattggctcgaggacactctctctgaaggaataagacagtggtggaagctcaaacctggcccaccaccaccaaagcccgcagagcggcataaggacgacagcaggggtcttgtgcttcctgggtacaagtacctcggacccttcaacggactcgacaagggagagccggtcaacgaggcagacgccgcggccctcgagcacgacaaagcctacgaccagcagctccaagcgggtgacaatccgtacctgcggtataaccacgccgacgccgagtttcaggagcgtcttcaaggagatacgtcttttgggggcaacctcggacgagcagtcttccaggccaaaaagaggcttcttgaacctcttggtctggttgaggaagcggctaagacggctcctggaaagaagaggcctgtagagcagtctcctcaggaaccggactcctccgcgggtattggcaaatcgggtgcacagcccgctaaaaagagactcaatttcggtcagactggcgacacagagtcagtcccagaccctcaaccaatcggagaacctcccgcagccccctcaggtgtgggatctcttacaatggcttcaggtggtggcgcaccagtggcagacaataacgaaggtgccgatggagtgggtagttcctcgggaaattggcattgcgattcccaatggctgggggacagagtcatcaccaccagcacccgaacatgggccttgcccacctataacaaccacctctacaagcaaatctccagtgcttcaacgggggccagcaacgacaaccactacttcggctacagcaccccctgggggtattttgacttcaaccgcttccactgccacttctcaccacgtgactggcagcgactcatcaacaacaactggggattccggcccaagagactcagcttcaagctcttcaacatccaggtcaaggaggtcacgcagaatgaaggcaccaagaccatcgccaataacctcaccagcaccatccaggtgtttacggactcggagtaccagctgccgtacgttctcggctctgcccaccagggctgcctgcctccgttcccggcggacgtgttcatgattccccagtacggctacctaacactcaacaacggtagtcaggccgtgggacgctcctccttctactgcctggaatactttccttcgcagatgctgagaaccggcaacaacttccagtttacttacaccttcgaggacgtgcctttccacagcagctacgcccacagccagagcttggaccggctgatgaatcctctgattgaccagtacctgtactacttgtctcggactcaaacaacaggaggcacggcaaatacgcagactctgggcttcagccaaggtgggcctaatacaatggccaatcaggcaaagaactggctgccaggaccctgttaccgccaacaacgcgtctcaacgacaaccgggcaaaacaacaatagcaactttgcctggactgctgggaccaaataccatctgaatggaagaaattcattggctaatcctggcatcgctatggcaacacacaaagacgacaaggagcgtttttttcccagtaacgggatcctgatttttggcaaacaaaatgctgccagagacaatgcggattacagcgatgtcatgctcaccagcgaggaagaaatcaaaaccactaaccctgtggctacagaggaatacggtatcgtggcagataacttgcagcagcaaaacacggctcctcaaattggaactgtcaacagccagggggccttacccggtatggtctggcagaaccgggacgtgtacctgcagggtcccatctgggccaagattcctcacacggacggcaacttccacccgtctccgctgatgggcggctttggcctgaaacatcctccgcctcagatcctgatcaagaacacgcctgtacctgcggatcctccgaccaccttcaaccagtcaaagctgaactctttcatcacgcaatacagcaccggacaggtcagcgtggaaattgaatgggagctgcagaaggaaaacagcaagcgctggaaccccgagatccagtacacctccaactactacaaatctacaagtgtggactttgctgttaatacagaaggcgtgtactctgaaccccaccccattggcacccgttacctcacccgtcccctgtaa

SEQ ID NO: 3473 - DNA, 2217 bp, Artificial Sequence
  Synthetic polynucleotide
atggctgccgatggttatcttccagattggctcgaggacaacctctctgagggaataagacagtggtggaagctcaaacctggcccaccaccaccaaagcccgcagagcggcataaggacgacagcaggggtcttgtgcttcctgggtacaagtacctcggacccttcaacggactcgacaagggagagccggtcaacgcggcggacgcagcggccctcgagcacgacaaggcctacgaccagcagctcaaagcgggtgacaatccgtacctgcggtataaccacgccgacgccgagtttcaggagcgtctgcaagaagatacgtcttttgggggcaacctcgggcgagcagtcttccaggccaagaagcgggttctcgaacctctcggtctggttgaggaaggcgctaagacggctcctggaaagaagagaccggtagagccatcaccccagcgttctccagactcctctacgggcatcggcaagaaaggccagcagcccgctaaaaagagactcaattttggtcagactggcgactcagagtcagtccccgacccacaacctctcggagaacctccagcaacccccgctgctgtgggacctactacaatggcttcaggcggtggcgcaccaatggcagacaataacgaaggcgccgacggagtgggtaatgcctcaggaaattggcattgcgattccacatggctgggggacagagtcatcaccaccagcacccgaacctgggccctgcccacctacaacaaccacctctacaagcaaatctccaacgggacttcgggaggaagcaccaacgacaacacctacttcggctgcgtcacgccctgggggtattttgactttaacaaattccactgccacttttcaccggatgactggcaacgactcatcaacaacggctggggattccggactaagcgactcaacttcaagctcttcagcatgaaagtcaaaaagggtacggacaacactggaatcaagaccatcgcgaataaccttaccaacacggtccatgtcttcgcggactcggagtaccagttgccgtacgtcctcggctctgcgcaccagggctgcctccctccgttcccggcggacgtgttcatgattccgcagtacggctacctaacgctcaacaatggcagccaggcagtgggacggtcatccttttactgcctggaatatttcccatcgcagatgctgagaacgggcaacaactttaccttcagctacacctttgaggacgttcctttccacagcagctacgctcacagccagagtctggaccgtctcatgaatcctctgattgaccagtacctgtactacttgtctcggactcaaacaacaggaggcacggcaaatacgcagactctgggcttcagccaaggtgggcctaatacaatggccaatcaggcaaagaactggctgccaggaccctgttaccgccaacaacgcgtctcaacgacaaccgggcaaaacaacaatagcaactttgcctggactgctgggaccaaataccatctgaatggaagaaattcattggctaatcctggcatcgctatggcaacacacaaagacgacaaggagcgtttttttcccagtaacgggatcctgatttttggcaaacaaaatgctgccagagacaatgcggattacagcgatgtcatgctcaccagcgaggaagaaatcaaaaccactaaccctgtggctacagaggaatacggtatcgtggcagataacttgcagcagcaaaacacggctcctcaaattggaactgtcaacagccagggggccttacccggtatggtctggcagaaccgggacgtgtacctgcagggtcccatctgggccaagattcctcacacggacggcaacttccacccgtctccgctgatgggcggctttggcctgaaacatcctccgcctcagatcctgatcaagaacacgcctgtacctgcggatcctccgaccaccttcaaccagtcaaagctgaactctttcatcacgcaatacagcaccggacaggtcagcgtggagatcgagtgggagctgcagaaggaaaacagcaagcgctggaacccggagatccagtacacctccaactactacaaatctacaagtgtggactttgctgttaatacagaaggcgtgtactctgaaccccaccccattggcacccgttacctcacccgtcccctgtaa

SEQ ID NO: 3474 - DNA, 2214 bp, Artificial Sequence
  Synthetic polynucleotide
atggctgccgatggttatcttccagattggctcgaggacactctctctgaaggaataagacagtggtggaagctcaaacctggcccaccaccaccaaagcccgcagagcggcataaggacgacagcaggggtcttgtgcttcctgggtacaagtacctcggacccttcaacggactcgacaagggggagcccgtcaacgcggcggacgcagcggccctcgagcacgacaaggcctacgaccagcagctcaaagcgggtgacaatccgtacctgcggtataaccacgccgacgccgagtttcaggagcgtctgcaagaagatacgtcttttgggggcaacctcgggcgagcagtcttccaggccaagaagcgggttctcgaacctctcggtctggttgaggaaggcgctaagacggctcctggaaagaagagaccggtagagccatcaccccagcgttctccagactcctctacgggcatcggcaagaaaggccagcagcccgcgaaaaagagactcaactttgggcagactggcgactcagagtcagtgcccgaccctcaaccaatcggagaaccccccgcaggcccctctggtctgggatctggtacaatggctgcaggcggtggcgctccaatggcagacaataacgaaggcgccgatggagtgggtagttcctcgggaaattggcattgcgattccacatggctgggggacagagtcatcaccaccagcacccgaacctgggccctgcccacctacaacaaccacctctacaaacaaatttccagcgcttcaacgggagcctcgaacgacaatcactactttggctacagcaccccctgggggtattttgacttcaacagattccactgccacttctcaccacgtgactggcagcgactcatcaacaacaactggggattccggcctaagcgactcaacttcaagctcttcaacattcaggtcaaagaggttacggacaacaatggagtcaagaccatcgccaataaccttaccagcacggtccaggtcttcacggactcggagtaccagttgccgtacgtcctcggctctgcgcaccagggctgcctccctccgttcccggcggacgtgttcatgattccgcagtacggctacctaacgctcaacaatggcagccaggcagtgggacggtcatccttttactgcctggaatatttcccatcgcagatgctgagaacgggcaacaactttaccttcagctacacctttgaggacgttcctttccacagcagctacgctcacagccagagtctggaccgtctcatgaatcctctgattgaccagtacctgtactacttgtctcggactcaaacaacaggaggcacggcaaatacgcagactctgggcttcagccaaggtgggcctaatacaatggccaatcaggcaaagaactggctgccaggaccctgttaccgccaacaacgcgtctcaacgacaaccgggcaaaacaacaatagcaactttgcctggactgctgggaccaaataccatctgaatggaagaaattcattggctaatcctggcatcgctatggcaacacacaaagacgacaaggagcgtttttttcccagtaacgggatcctgatttttggcaaacaaaatgctgccagagacaatgcggattacagcgatgtcatgctcaccagcgaggaagaaatcaaaaccactaaccctgtggctacagaggaatacggtatcgtggcagataacctgcagcagcaaaacacggctcctcaaattggaactgtcaacagccagggggccttacccggtatggtctggcagaaccgggacgtgtacctgcagggtcccatctgggccaagattcttcacacggacggcaactttcacccttctccgctgatgggagggtttggaatgaagcacccgcctcctccgatcctgatcaagaacacgcctgtacctgcggatcctccgaccaccttcaaccagtcaaagctgaactctttcatcacgcaatacagcaccggacaggtcagcgtggaaattgaatgggagctgccgaaggaaaacagcaagcgctggaaccccgagatccagtacacctccaactactacaaatctacaagtgtggactttgctgttaatacagaaggtgtgtactatgaaccccaccccattggcacccgttacctcacccctcccctgtaa

SEQ ID NO: 3475 - DNA, 2214 bp, Artificial Sequence
  Synthetic polynucleotide
atggctgccgatggttatcttccagattggctcgaggacaacctctctgagggcattcgcgagtggtgggcgctgaaacctggagccccgaagcccaaagccaaccagcaaaagcaggacgacggccggggtctggtgcttcctggctacaagtacctcggacccttcaacggactcgacaagggggagcccgtcaacgcggcggacgcagcggccctcgagcacgacaaggcctacgaccagcagctcaaagcgggtgacaatccgtacctgcggtataaccacgccgacgccgagtttcaggagcgtctgcaagaagatacgtcttttgggggcaacctcgggcgagcagtcttccaggccaagaagcgggttctcgaacctctcggtctggttgaggaaggcgctaagacggctcctggaaagaagagaccggtagagccatcaccccagcgctctccagactcctctacgggcatcggcaagaaaggccaacagcccgccagaaaaagactcaattttggtcagactggcgactcagagtcagttccagaccctcaacctctcggagaacctccagcagcgccctctggtgtggcacctaatacaatggctgcaggcggtggcgcaccaatggcagacaataacgaaggcgccgacggagtgggtaatgcctcaggaaattggcattgcgattccacatggctgggcgacagagtcatcaccaccagcacccgaacatgggccttgcccacctataacaaccacctctacaagcaaatctccagtgcttcaacgggggccagcaacgacaaccactacttcggctacagcaccccctgggggtattttgatttcaacagattccactgccacttttcaccacgtgactggcagcgactcatcacaacaattgggggattccggcctaagcgactcaacttcaagctcttcaacattcaggtcaaagaggttacggacaacaatggagtcaagaccatcgccaataaccttaccagcacggtccaggtcttcacggactcggagtaccagttgccgtacgtcctcggctctgcgcaccagggctgcctccctccgttcccggcggacgtgttcatgattccgcagtacggctacctaacgctcaacaatggcagccaggcagtgggacggtcatccttttactgcctggaatatttcccatcgcagatgctgagaacgggcaacaactttaccttcagctacacctttgaggacgttcctttccacagcagctacgctcacagccagagtctggaccggctgatgaatcctctgattgaccagtacctgtactacttgtctcggactcaaacaacaggaggcacggcaaatacgcagactctgggcttcagccaaggtgggcctaatacaatggccaatcaggcaaagaactggctgccaggaccctgttaccgccaacaacgcgtctcaacgacaaccgggcaaaacaacaatagcaactttgcctggactgctgggaccaaataccatctgaatggaagaaattcattggctaatcctggcatcgctatggcaacacacaaagacgacaaggagcgtttttttcccagtaacgggatcctgatttttggcaaacaaaatgctgccagagacaatgcggattacagcgatgtcatgctcaccagcgaggaagaaatcaaaaccactaaccctgtggctacagaggaatacggtatcgtggcagataacttgcagcagcaaaacacggctcctcaaattggaactgtcaacagccagggggccttacccggtatggtctggcagaaccgggacgtgtacctgcagggtcccatctgggccaagattcctcacacggacggcaacttccacccgtctccgctgatgggcggctttggcctgaaacatcctccgcctcagatcctgatcaagaacacgcctgtacctgcggatcctccgaccaccttcaaccagtcaaagctgaactctttcatcacgcaatacagcaccggacaggtcagcgtggaaattgaatgggagctgcagaaggaaaacagcaagcgctggaaccccgagatccagtacacctccaactactacaaatctacaagtgtggactttgctgttaatacagaaggcgtgtactctgaaccccaccccattggcacccgttacctcacccgtcccctgtaa

SEQ ID NO: 3476 - DNA, 2211 bp, Artificial Sequence
  Synthetic polynucleotide
atggctgccgatggttatcttccagattggctcgaggacactctctctgaaggaataagacagtggtggaagctcaaacctggcccaccaccaccaaagcccgcagagcggcataaggacgacggccggggtctggtgcttcctggctacaagtacctcggacccttcaacggactcgacaagggggagcccgtcaacgcggcggacgcagcggccctcgagcacgacaaggcctacgaccagcagctcaaagcgggtgacaatccgtacctgcggtataaccacgccgacgccgagtttcaggagcgtctgcaagaagatacgtcttttgggggcaacctcggacgagcagtcttccaggcgaaaaagagggttcttgaacctctgggcctggttgaggaacctgttaagacggctccgggaaaaaagaggccggtagagcagtcgccacaagagccagactcctcctcgggcatcggcaagaaaggccagcagcccgctaaaaagagactcaattttggtcagactggcgactcagagtcagtccccgacccacaacctctcggagaacctccagcaacccccgctgctgtgggacctactacaatggcttcaggcggtggcgcaccaatggcagacaataacgaaggcgccgacggagtgggtaatgcctcaggaaattggcattgcgattccacatggatgggcgacagagtcatcaccaccagcacccgaacatgggccttgcccacctataacaaccacctctacaagcaaatctccagtgcttcaacgggggccagcaacgacaaccactacttcggctacagcaccccctgggggtattttgactttaacagattccactgccacttttcaccacgtgactggcagcgactcatcaacaacaactggggattccggcctaagcgactcaacttcaagctcttcaacattcaggtcaaggaggtcacgcagaatgaaggcaccaagaccatcgccaataacctcaccagcaccatccaggtgtttacggactcggagtaccagctgccgtacgttctcggctccgcccaccagggctgcctgcctccgttcccggcggacgtgttcatgatcccccagtacggctacctaacactcaacaacggtagtcaggccgtgggacgctcctccttctactgcctggaatactttccttcgcagatgctgagaaccggcaacaacttccagtttacttacaccttcgaggacgtgcctttccacagcagctacgcgcacagccagagcttggaccggctgatgaatcctctgattgaccagtacctgtactacttgtctcggactcaaacaacaggaggcacggcaaatacgcagactctgggcttcagccaaggtgggcctaatacaatggccaatcacgcaaagaactggctgccaggaccctgttaccgccaacaacgcgtctcaacgacaaccgggcaaaacaacaatagcaactttgcctggactgctgggaccaaataccatctgaatggaagaaattcattggctaatcctggcatcgctatggcaacacacaaagacgacaaggagcgtttttttcccagtaacgggatcctgatttttggcaaacaaaatgctgccagagacaatgcggattacagcgatgtcatgctcaccagcgaggaagaaatcaaaaccactaaccctgtggctacagaggaatacggtatcgtggcagataacttgcagcagcaaaacacggctcctcaaattggaactgtcaacagccagggggccttacccggtatggtctggcagaaccgggacgtgtacctgcagggtcccatctgggccaagattcctcacacggacggcaacttccacccgtctccgctgatgggcggcttcggcctgaaacatcctccgcctcagatcctgatcaagaacacgcctgtacctgcggatcctccgaccaccttcaaccagtcaaagctgaactctttcatcacgcaatacagcaccggacaggtcagcgtggaaattgaatgggagctgcagaaggaaaacagcaagcgctggaaccccgagatccagtacacctccaactactacaaatctacaagtgtggactttgctgttaatacagaaggcgtgtactctgaaccccaccccattggcacccgttacctcacccgtcccctgtaa

SEQ ID NO: 3477 - DNA, 2214 bp, Artificial Sequence
  Synthetic polynucleotide
atggctgccgatggttatcttccagattggctcgaggacaacctctctcagggcattcgcgagtggtgggacttgaaacctggagccccgaaacccaaagccaaccagcaaaagcaggacgacggccggggtctggtgcttcctggctacaagtacctcggacccttcaacggactcgacaagggggagcccgtcaacgcggcggacgcagcggccctcgagcacgacaaggcctacgaccagcagctcaaagcgggtgacaatccgtacctgcggtataaccacgccgacgccgagtttcaggagcgtctgcaagaagatacgtcttttgggggcaacctcggacgagcagtcttccaggccaagaagcgggttctcgaacctctcggtctggttgaggaaggcgctaagacggctcctggaaagaagagaccggtagagccatcaccccagcgttctccagactcctctacgggcatcggcaagaaaggccaacagcccgccagaaaaagactcaattttggtcagactggcgactcagagtcagttccagaccctcaacctctcggagaacctccagcagcgcccgctgctgtgggacctactacaatggcttcaggcggtggcgcaccaatggcagacaataacgaaggcgccgacggagtgggtagttcctcgggaaattggcattgcgattcccaatggctgggggacagagtcatcaccaccagcacccgaacctgggccctgcccacctacaacaaccacctctacaagcaaatctccagtgcttcaacgggggccagcaacgacaaccactacttcggctacagcaccccctgggggtattttgacttcaacagattccactgccacttttcaccacgtgactggcaaagactcatcaacaacaactggggattccggcccaagagactcagcttcaagctcttcaacatccaggtcaaggaggtcacgcagaatgaaggcaccaagaccatcgccaataacctcaccagcaccatccaggtgtttacggactcggagtaccagctgccgtacgttctcggctctgcccaccagggctgcctgcctccgttcccggcggacgtgttcatgattccccagtacgggtacctgactctgaacaatggcagtcaggccgtgggccgttcctccttctactgcctggagtactttccttctcaaatgctgagaaccggcaacaacttccagtttacttacaccttcgaggacgtgcctttccacagcagctacgcccacagccagagcttggaccggctgatgaatcctctgattgaccagtacctgtactacttgtctcggactcaaacaacaggaggcacgacaaatgcgcagactctgggcttcagccaaggtgggcctaatacaatggccaatcaggcaaagaactggctgccaggaccctgttaccgccaacaacgcgtctcaacgacaaccgggcaaaacaacaatagcaactttgcctggactgctgggaccaaataccatctgaatggaagaaattcattggctaatcctggcatcgctatggcaacacacaaagacgacaaggagcgtttttttcccagtaacgggatcctgatttttggcaaacaaaatgctgccagagacaatgcggattacagcgatgtcatgctcaccagcgaggaagaaatcaaaaccactaaccctgtggctacagaggaatacggtatcgtggcagataacttgcagcagcaaaacacggctcctcaaattggaactgtcaacagccagggggccttacccggtatggtctggcagaaccgggacgtgtacctgcagggtcccatctgggccaagattcctcacacggacggcaacttccacccgtctccgctgatgggcggctttggcctgaaacatcctccgcctcagatcctgatcaagaacacgcctgtacctgcggatcctccgaccaccttcaaccagtcaaagctgaactctttcatcacacagtactccacgggacaggtcagcgtggaaattgaatgggagctgcagaaggaaaacagcaagcgctggaacccggagatccagtacacttccaactactacaaatctacaaatgtggactttgctgttaacacagaaggcgtgtactctgaaccccaccccattggcacccgttacctcacccgtcccctgtaa

SEQ ID NO: 3478 - DNA, 2211 bp, Artificial Sequence
  Synthetic polynucleotide
atggctgccgatggttatcttccagattggctcgaggacaacctctctgagggcattcgcgagtggtgggacttgaaacctggagccccgaaacccaaagccaaccagcaaaagcaggacgacggccggggtctggtgcttcctggctacaagtacctcggacccttcaacggactcgacaagggggagcccgtcaacgcggcggacgcagcggccctcgagcacgacaaggcctacgaccagcagctcaaagcgggtgacaatccgtacctgcggtataaccacgccgacgccgagtttcaggagcgtctgcaagaagatacgtcttttgggggcaacctcgggcgagcagtcttccaggccaagaagagggttctcgaaccttttggtctggttgaggaaggcgctaagacggctcctggaaagaaacgtccggtagagcagtcgccacaagagccagactcctcctcgggcatcggcaagacaggccagcagcccgctaaaaagagactcaatttcggtcagactggcgacacagagtcagtcccagaccctcaaccaatcggagaacctcccgcagccccctcaggtgtgggacctaatacaatggctgcaggcggtggcgcaccaatggcagacaataacgaaggcgccgacggagtgggtagttcctcgggaaattggcattgcgattccacatggatgggtgacagagtcatcaccaccagcacccgaacctgggccctgcccacctacaataaccacctctacaagcaaatctccagtgcttcaacgggggccagcaacgacaaccactacttcggctacagcaccccctgggggtattttgacttcaacagattccactgccacttctcaccacgtgactggcagcgactcatcaacaacaactggggattccggcctaagcgactcaacttcaagctcttcaacattcaggtcaaggaggtcacgcagaatgaaggcaccaagaccatcgccaataacctcaccagcaccatccaggtgtttacggactcggagtaccagctgccgtacgttctcggctctgcccaccagggctgcctgcctccgttcccggcggacgtgttcatgattccccagtacggctacctaacactcaacaacggtagtcaggccgtgggacgctcctccttctactgcctggaatactttccttcgcagatgctgagaaccggcaacaacttccagtttacttacaccttcgaggacgtgcctttccacagcagctacgcccacagccagagcttggaccggctgatgaatcctctgattgaccagtacctgtactacttgtctcggactcaaacaacaggaggcacggcaaatacgcagactctgggcttcagccaaggtgggcctaatacaatggccaatcaggcaaagaactggctgccaggaccctgttaccgccaacaacgcgtctcaacgacaaccgggcaaaacaacaatagcaactttgcctggactgctgggaccaaataccatctgaatggaagaaattcattggctaatcctggcatcgctatggcaacacacaaagacgacaaggagcgtttttttcccagtaacgggatcctgatttttggcaaacaaaatgctgccagagacaatgcggattacagcgatgtcatgctcaccagcgaggaagaaatcaaaaccactaaccctgtggctacagaggaatacggtatcgtggcagataacttgcagcagcaaaacacggctcctcaaattggaactgtcaacagccagggggccttacccggtatggtctggcagaaccgggacgtgtacctgcagggtcccatctgggccaagattcctcacacggacggcaacttccacccgtctccgctgatgggcggctttggcctgaaacatcctccgcctcagatcctgatcaagaacacgcctgtacctgcggatcctccgaccaccttcaaccagtcaaagctgaactctttcatcacacagtactccacgggacaggtcagcgtggaaattgaatgggagctgcagaaggaaaacagcaagcgctggaacccggagatccagtacacttccaactactacaaatctacaaatgtggactttgctgttaacacagaaggcgtgtactctgaaccccaccccattggcacccgttacttcacccgtcccctgtaa

SEQ ID NO: 3479 - DNA, 2211 bp, Artificial Sequence
  Synthetic polynucleotide
atggctgccgatggttatcttccagattggctcgaggacaacctctctgagggcattcgcgagtggtgggacttgaaacctggagccccgaaacccaaagccaaccagcaaaagcaggacgacggccggggtctggtgcttcctggctacaagtacctcggacccttcaacggactcgacaagggggagcccgtcaacgcggcggacgcagcggccctcgagcacgacaaggcctacgaccagcagctcaaagcgggtgacaatccgtacctgcggtataaccacgccgacgccgagtttcaggagcgtctgcaagaagatacgtcttttgggggcaacctcgggcgagcagtcttccaggccaagaagcgggttctcgaacctctcggtctggttgaggaaggcgctaagacggctcctggaaagaaacgtccggtagagcagtcgccacaagagccagactcctcctcgggcatcggcaagacaggccagcagcccgctaaaaaaagactcaattttggtcagactggcgactcagagtcagttccagaccctcaacctctcggagaacctccagcaacccccgctgctgtgggacctactacaatggcttcaggtggtggcgcaccaatggcagacaataacgagggcgccgacggagtgggtaattcctcgggaaattggcattgcgattccacatggatgggcgacagagtcatcaccaccagcacccgaacctgggccctgcccacctacaacaatcacctctacaagcaaatctccagtgcttcaacgggggccagcaacgacaaccactacttcggctacagcaccccctgggggtattttgacttcaacagattccactgccacttctcaccacgtgactggcagcgactcatcaacaacaactggggattccggcctaagcgactcaacttcaagctcttcaacattcaggtcaaagaggttacggacaacaatggagtcaagaccatcgccaataaccttaccagcacggtccaggtcttcacggactcggagtaccagttgccgtacgtcctcggctctgcgcaccagggctgcctccctccgttcccggcggacgtgttcatgattccgcagtacggctacctaacgctcaacaacggtagtcaggccgtgggacgctcctccttctactgcctggaatactttccttcgcagatgctgagaaccggcaacaacttccagtttacttacaccttcgaggacgtgcctttccacagcagctacgcccacagccagagcttggaccggctgatgaatcctctgattgaccagtacctgtactacttgtctcggactcaaacaacaggaggcacggcaaatacgcagactctgggcttcagccaaggtgggcctaatacaatggccaatcaggcaaagaactggctgccaggaccctgttaccgccaacaacgcgtctcgacgacaaccgggcaaaacaacaatagcaactttgcctggactgctgggaccaaataccatctgaatggaagaaattcattggctaatcctggcatcgctatggcaacacacaaagacgacaaggagcgtttttttcccagtaacgggatcctgatttttggcaaacaaaatgctgccagagacaatgcggattacagcgatgtcatgctcaccagcgaggaagaaatcaaaaccactaaccctgtggctacagaggaatacggtatcgtggcagataacttgcagcagcaaaacacggctcctcaaattggaactgtcaacagccagggggccttacccggtatggtttggcagaaccgggacgtgtacctgcagggtcccatctgggccaagattcctcacacggacggcaacttccacccgtctccgctgatgggcggctttggcctgaaacatcctccgcctcagatcctgatcaagaacacgcctgtacctgcggatcctccgaccaccttcaaccagtcaaagctgaactctttcatcacacagtactccacgggacaggtcagcgtggaaattgaatgggagctgcagaaggaaaacagcaagcgctggaacccggagatccagtacacttccaactactacaaatctacaaatgtggactttgctgttaacacagaaggcgtgtactctgaaccccaccccattggcacccgttacctcacccgtcccctgtaa

SEQ ID NO: 3480 - DNA, 2211 bp, Artificial Sequence
  Synthetic polynucleotide
atggctgccgatggttatcttccagattggctcgaggacaacctctctgagggcattcgcgagtggtgggacttgaaacctggagccccgaagcccaaagccaaccagcaaaagcaggacgacggccggggtctggtgcttcctggctacaagtacctcggacccttcaacggactcgacaagggggagcccgtcaacgcggcggacgcagcggccctcgagcacgacaaggcctacgaccagcagctcaaagcgggtgacaatccgtacctgcggtataaccacgccgacgccgagtttcaggagcgtctgcaagaagatacgtcttttgggggcaacctcgggcgagcagtcttccaggccaagaagcgggttctcgaacctctcggtctggttgaggaaggcgctaagacggctcctggaaagaaacgtccggtagagcagtcaccacaagagccagactcctcctcgggcatcggcaagacaggccagcagcccgctaaaaagagactcaattttggtcagactggcgactcagagtcagtccccgacccacaacctctcggagaacctccagcaacccccgctgctgtgggacctactacaatggcttcaggcggtggcgcaccaatggcggacaataacgaaggcgccgatggagtgggtaatgcctcaggaaattggcattgcgattccacatggctgggcgacagagtcatcaccaccagcacccgaacatgggccttgcccacctataacaaccacctctacaagcaaatctccagtgcttcaacgggggccagcaacgacaaccactacttcggctacagcaccccctgggggtattttgactttaacagattccactgccacttctcaccacgtgactggcagcgactcatcaacaacaactggggattccggcccaagagactcaacttcaagctcttcaacatccaggtcaaggaggtcacgcagaatgaaggcaccaagaccatcgccaataacctcaccagcaccatccaggtgtttacggactcggagtaccagctgccgtacgttctcggctctgcccaccagggctgcctgcctccgttcccggcggacgtgttcatgattccccagtacggctacctgactctgaacaatggcagtcaggccgtgggccgttcctccttctactgcctagagtactttccttctcaaatgctgagaacgggcaacaactttgagttcagctaccagtttgaggacgtgccttttcacagcagctacgcgcacagccaaagcctggaccggctgatgaatcctctgattgaccagtacctgtactacttgtctcggactcaaacaacaggaggcacggcaaatacgcagactctgggcttcagccaaggtgggcctaatacaatggccaatcaggcaaagaactggctgccaggaccctgttaccgccaacaacgcgtctcaacgacaaccgggcaaaacaacaatagcaactttgcctggactgctgggaccaaataccatatgaatggaagaaattcattggttaatcctggcatcgctatggcaacacacaaagacgacaaggagcgtttttttcccagtaacgggatcctgatttttggcaaacaaaatgttgccagagacaatgcggattacagcgatgtcatgctcaccagcgaggaagaaatcaaaaccactaaccctgtggctacagaggaatacggtattgtggcagataacttgcagcagcaaaacacggctcctcaaattggaactgtcaacagccagggggccttacccggtatggtctggcagaaccgggacgtgtacctgcagggtcccatctgggccaagattcctcacacggacggcaacttccacccgtcgccgctgatgggcggctttggcctgaaacatcctccgcctcagatcctgatcaagaacacgcctgtacctgcggatcctccgaccaccttcaaccagtcaaagctgaactctttcatcacgcaatacagcaccggacaggtcagcgtggaaattgaatgggagctgcagaaggaaaacagcaagcgctggaaccccgagatccagtacacctccaactactacaaatctacaagtgtggactttgctgttaatacagaaggcgtgtactctgaaccccaccccattggcacccgttacctcacccgtcccctgtaa

SEQ ID NO: 3481 - protein, 736 aa, Artificial Sequence
  Synthetic polypeptide
MAADGYLPDWLEDTLSEGIRQWWKLKPGPPPPKPAERHKDDSRGLVLPGYKYLGPFNGLDKGEPVNEADAAALEHDKAYDRQLDSGDNPYLKYNHADAEFQERLKEDTSFGGNLGRAVFQAKKRVLEPLGLVEEPVKTAPGKKRPVEQSPQEPDSSSGIGKKGQQPAKKRLNFGQTGDSESVPDPQPLGEPPATPAAVGPTTMASGGGAPMADNNEGADGVGNASGNWHCDSTWMGDRVITTSTRTWALPTYNNHLYKQISSASTGASNDNHYFGYSTPWGYFDFNRFHCHFSPRDWQRLINNNWGFRPKRLNFRLFNIQVKEVTDNNGVKTIANNLTSTVQVFTDSEYQLPYVLGSAHQGCLPPFPADVFMIPQYGYLTLNNGSQAVGRSSFYCLEYFPSQMLRTGNNFTFSYTFEEVPFHSSYAHSQSLDRLMNPLIDQYLYYLSRTQTTGGTANTQTLGFSQGGPNTMANQAKNWLPGPCYRQQRVSTTTGQNNNSNFAWTAGTKYHLNGRNSLANPGIAMATHKDDKERFFPSNGILIFGKQNAARDNADYSDVMLTSEEEIKTTNPVATEEYGIVADNLQQQNTAPQIGTVNSQGALPGMVWQNRDVYLQGPIWAKIPHTDGNFHPSPLMGGFGLKHPPPQILIKNTPVPADPPTTFNQSKLNSFITQYSTGQVSVEIEWELQKENSKRWNPEIQYTSNYYKSTSVDFAVNTEGVYSEPHPIGTRYLTRPL

SEQ ID NO: 3482 - protein, 736 aa, Artificial Sequence
  Synthetic polypeptide
MAADGYLPDWLEDNLSEGIREWWDLKPASPKPKANQQKQDDGRGLVLPGYKYLGPFNGLDKGEPVNAADAAALEHDKAYDQQLKAGDNPYLRYNHADAEFQERLQEDTSFGGNLGRAVFQAKKRLLEPLGLVEEAAKTAPGKKRPVEQSPQEPDSSAGIGKSGAQPAKKRLNFGQTGGTESVPDPQPLGEPPAAPSGVGPNTMAAGGGAPMADNNEGADGVGSSSGNWHCDSTWLGDRVITTSTRTWALPTYNNHLYKQISSASTGASNDNHYFGYSTPWGYFDFNRFHCHFSPRDWQRLINNNWGFRPKRLSFKLFNIQVKEVTQNEGTKTIANNLTSTIQVFTDSEYQLPYVLGSAHQGCLPPFPADVFMIPQYGYLTLNNGSQAVGRSSFYCLEYFPSQMLRTGNNFQFTYTFEDVPFHSSYAHSQSLDRLMNPLIDQYLYYLSRTQTTGGTANTQTLGFSQGGPNTMANQAKNWLPGPCYRQQRVSTTTGQNNNSNFAWTAGTKYHLNGRNSLANPGIAMATHKDDKERFFPSNGILIFGKQNAARDNADYSDVMLTSEEEIKTTNPVATEEYGIVADNLQQQNTAPQIGTVNSQGALPGMVWQNRDVYLQGPIWAKIPHTDGNFHPSPLMGGFGLKHPPPQILIKNTPVPADPPTTFNQSKLNSFITQYSTGQVSVEIEWELQKENSKRWNPEIQYTSNYYKSTSVDFAVNTEGVYSEPHPIGTRYLTRPL

SEQ ID NO: 3483 - protein, 736 aa, Artificial Sequence; identical to SEQ ID NO: 3422
  Synthetic polypeptide

SEQ ID NO: 3484 - protein, 736 aa, Artificial Sequence
  Synthetic polypeptide
MAADGYLPDWLEDNLSEGIREWWDLEPGAPKPKANQQKQDDGRGLVLPGYKYLGPFNGLDKGEPVNAADAAALEHDKAYDQQLKAGDNPYLRYNHADAEFQERLQEDTSFGGNLGRAVFQAKKRVLEPLGLVEEGAKTAPGKKRPVEQSPQEPDSSSGIGKTGQQPAKKRLNFGQTGDSESVPDPQPLGEPPATPAAVGPTTMASGGGAPMADNNEGADGVGNASGNWHCDSTWLGDRVITTSTRTWALPTYNNHLYKQISSASTGASNDNHYFGYSTPWGYFDFNRFHCHFSPRDWQRLINNNWGFRPKRLNFKLFNIQVKEVTDNNGVKTIANNLTSTVQVFTDSEYQLPYVLGSAHQGCLPPFPADVFMIPQYGYLTLNNGSQAVGRSSFYCLEYFPSQMLRTGNNFQFTYTFEDVPFHSSYAHSQSLDRLMNPLIDQYLYYLSRTQTTGGTANTQTLGFSQGGPNTMANQAKNWLPGPCYRQQRVSTTTGQNNNSNFAWTAGTKYHLNGRNSLANPGIAMATHKDDKERFFPSNGILIFGKQNAARDNADYSDVMLTSEEEIKTTNPVATEEYGIVADNLQQQNTAPQIGTVNSQGALPGMVWQNRDVYLQGPIWAKIPHTDGNFHPSPLMGGFGLKHPPPQILIKNTPVPADPPTTFNQSKLNSFITQYSTGQVSVEIEWELQKENSKRWNPEIQYTSNYYKSTSVDFAVNTEGVYSEPHPIGTRYLTRPL

SEQ ID NO: 3485 - protein, 736 aa, Artificial Sequence; identical to SEQ ID NO: 3422
  Synthetic polypeptide

SEQ ID NO: 3486 - protein, 736 aa, Artificial Sequence
  Synthetic polypeptide
MAADGYLPDWLEDTLSEGIRQWWKLKPGPPPPKPAERHKDDSRGLVLPGYKYLGPFNGLDKGEPVNEADAAALEHDKAYDRQLDSGDNPYLKYNHADAEFQERLKEDTSFGGNLGRAVFQAKKRVLEPLGLVEEPVKTAPGKKRPVEQSPQEPDSSSGIGKKGQQPAKKRLNFGQTGDSESVPDPQPLGEPPATPAAVGPTTMASGGGAPMADNNEGADGVGNASGNWHCDSTWLGDRVITTSTRTWALPTYNNHLYKQISSASTGASNDNHYFGYSTPWGYFDFNRFHCHFSPRDWQRLINNNWGFRPKRLNFKLFNIQVKEVTDNNGVKTIANNLTSTVQVFTDSDYQLPYVLGSAHQGCLPPFPADVFMIPQYGYLTLNNGSQAVGRSSFYCLEYFPSQMLRTGNNFQFTYTFEDVPFHSSYAHSQSLDRLMNPLIDQYLYYLSRTQTTGGTANTQTLGFSQGGPNTMANQAKNWLPGPCYRQQRVSTTTGQNNNSNFAWTAGTKYHLNGRNSLANPGIAMATHKDDKERFFPSNGILIFGKQNAARDNADYSDVMLTSEEEIKTTNPVATEEYGIVADNLQQQNTAPQIGTVNSQGALPGMVWQNRDVYLQGPIWAKIPHTDGNFHPSPLMGGFGLKHPPPQILIKNTPVPADPPTTFNQSKLNSFITQYSTGQVSVEIEWELQKENSKRWNPEIQYTSNYYKSTSVDFAVNTEGVYSEPHPIGTRYLTRPL

SEQ ID NO: 3487 - protein, 734 aa, Artificial Sequence
  Synthetic polypeptide
MAADGYLPDWLEDTLSEGIRQWWKLKPGPPPPKPAERHKDDSRGLVLPGYKYLGPFNGLDKGEPVNEADAAALEHDKAYDQQLQAGDNPYLRYNHADAEFQERLQGDTSFGGNLGRAVFQAKKRLLEPLGLVEEAAKTAPGKKRPVEQSPQEPDSSAGIGKSGAQPAKKRLNFGQTGDTESVPDPQPIGEPPAAPSGVGSLTMASGGGAPVADNNEGADGVGSSSGNWHCDSQWLGDRVITTSTRTWALPTYNNHLYKQISSASTGASNDNHYFGYSTPWGYFDFNRFHCHFSPRDWQRLINNNWGFRPKRLSFKLFNHPGQGGHAERHQDHRQPHQHIQVFTDSEYQLPYVLGSAHQGCLPPFPADVFMIPQYGYLTLNNGSQAVGRSSFYCLEYFPSQMLRTGNNFQFTYTFEDVPFHSSYAHSQSLDRLMNPLIDQYLYYLSRTQTTGGTANTQTLGFSQGGPNTMANQAKNWLPGPCYRQQRVSTTTGQNNNSNFAWTAGTKYHLNGRNSLGNPGIAMATHKDDKERFFPSNGILIFGKQNAARDNADYSDVMLTSEEEIKTTNPVATEEYGIVADNLQQQNTAPQIGTVNSQGALPGMVWQNRDVYLQGPIWAKIPHTDGNFHPSPLMGGFGLKHPPPQILIKNTPVPADPPTAFNQSKLNSFITQYSTGQVSVEIEWELQKENSKRWNPEIQYTSNYYKSTSVDFAVNTEGVYSEPHPIGTRYLTRPL

SEQ ID NO: 3488 - protein, 737 aa, Artificial Sequence
  Synthetic polypeptide
MAADGYLPDWLEDNLSEGIREWWDLKHGAPKPKANQQKQDDGRGLVLPGYKYLGPFNGLDKGEPVNAADAAALEHDKAYDQQLKAGDNPYLRYNHADAEFQERLQEDTSFGGNLGRAVFQAKKRVLEPFGLVEEGAKTAPGKKRPVEQSPQEPDSSSGIGKTGQQPAKKRLNFGQTGDSESVPDPQPLGEPPATPAAVGPTTMASGGGAPMADNNEGADGVGNASGNWHCDSTWLGDRVITTSTRTWALPTYNNHLYKQISNGTSGGSTNDNTYFGYSTPWGYFDFNRFHCHFSPRDWQRLINNNWGFRPKRLNFKLFNIQVKEVTQNEGTKTIANNLTSTIQVFTDSEYQLPYVLGSAHQGCLPPFPADVFMIPQYGYLTLNNGSQAVGRSSFYCLEYFPSQMLRTGNNFTFSYTFEDVPFHSSYAHSQSLDRLMNPLIDQYLYYLSRTQTTGGTANTQTLGFSQGGPNTMANQAKNWLPGPCYRQQRVSTTTGQNNNSNFAWTAGTKYHLNGRNSLANPGIAMATHKDDKERFFPSNGILIFGKQNAARDNADYSDVMLTSEEEIKTTNPVATEEYGIVADNLQQQNTAPQIGTVNSQGALPGMVWQNRDVYLQGPIWAKIPHTDGNFHPSPLMGGFGLKHPPPQILIKNTPVPADPPTTFNQSKLNSFITQYSTGQVSVEIEWELQKENSKRWNPEIQYTSNYYKSTSVDFAVNTEGVYSDPHPIGTRYLTRPL

SEQ ID NO: 3489 - protein, 737 aa, Artificial Sequence
  Synthetic polypeptide
MAADGYLPDWLEDNLSEGIREWWALKPGAPKPKANQQKQDDGRGLVLPGYKYLGPFNGLDKGEPVNEADAAALEHDKAYDQQLKAGDNPYLRYNHADAEFQERLQEDTSFGGNLGRAVFQAKKRVLEPLGLVEEGAKTAPGKKRPVEPSPQRSPDSSTGIGKKGQQPARKRLNFGQTGDSESVPDPQPLGEPPAAPSGVGPNTMASGGGAPMADNNEGADGVGNSSGNWHCDSTWMGDRVITTSTRTWALPTYNNHLYKQISSASTGASNDNHYFGYSTPWGYFDFNRFHCHFSPRDWQRLINNNWGFRPKRLNFKLFNIQVKEVTQNEGTKTIANNLTSTIQVFTDSEYQLPYVLGSAHQGCLPPFPADVFMIPQYGYLTLNNGSQAVGRSSFYCLEYFPSQMLRTGNNFQFTYTFEDVPFHSSYAHSQSLDRLMNPLIDQYLYYLSRTQTTGGTANTQTLGFSQGGPNTMANQAKNWLPGPCYRQQRVSTTTGQNNNSNFAWTAGTKYHLNGRNSLANPGIAMATHKDDKERFFPSNGILIFGKQNAARDNADYSDVMLTSEEEIKTTNPVATEEYGIVADNLQQQNTAPQIGTVNSQGALPGMVWQNRDVYLQGPIWAKIPHTDGNFHPSPLMGGFGLKHPPPQILIKNTPVPADPPTTFNQSKLNSFITQYSTGQVSVEIEWELQKENSKRWNPEIQYTSNYYKSTSVDFAVNTEGVYSEPHPIGTRYLTRPL

SEQ ID NO: 3490 - protein, 736 aa, Artificial Sequence
  Synthetic polypeptide
  MOD_RES (226)..(226): Any naturally occurring amino acid
MAADGYLPDWLEDTLSEGIRQWWKLKPGPPPPKPAERHKDDSRGLVLPGYKYLGPFNGLDKGEPVNEADAAALEHDKAYDRQLDSGDNPYLKYNHADAEFQERLKEDTSFGGNLGRAVFQAKKRVLEPLGLVEEPVKTAPGKKRPVEQSPQEPDSSSGIGKKGQQPAKKRLNFGQTGDSESVPDPQPLGEPPATPAAVGPTTMASGGGAPMADNNEGADGVGNASXNWHCDSTWLGDRVITTSTRTWALPPITTTSTSKSPVLQRGRSNDNHYFGYSTPWGYFDFNRFHCHFSPRDWQRLINNNWGFRPKRLNFKLFNIQVKEVTDNNGVKTIANNLTSTVQVFTDSDYQLPYVLGSAHQGCLPPFPADVFMIPQYGYLTLNNGSQAVGRSSFYCLEYFPSQMLRTGNNFQFTYTFEDVPFHSSYAHSQSLDRLMNPLIDQYLYYLSRTQTTGGTANTQTLGFSQGGPNTMANQAKNWLPGPCYRQQRVSTTTGQNNNSNFAWTAGTKYHLNGRNSLANPGIAMATHKDDKERFFPSNGILIFGKQNAARDNADYSDVMLTSEEEIKTTNPVATEEYGIVADNLQQQNTAPQIGTVNSQGALPGMVWQNRDVYLQGPIWAKIPHTDGNFHPSPLMGGFGLKHPPPQILIKNTPVPADPPTTFNQSKLNSFITQYSTGQVSVEIEWELQKENSKRWNPEIQYTSNYYKSTNVDFAVNTEGVYSEPHPIGTRYLTRPL

SEQ ID NO: 3491 - protein, 736 aa, Artificial Sequence
  Synthetic polypeptide
  MOD_RES (239)..(239): Any naturally occurring amino acid
MAADGYLPDWLEDNLSEGIREWWDLKPGAPKPKANQQKQDDGRGLVLPGYKYLGPFNGLDKGEPVNAADAAALEHDKAYDQQLQAGDNPYLRYNHADAEFQERLQGDTSFGGNLGRAVFQAKKRVLEPLGLVEEAAKTAPGKKRPVEQSPQEPDSSAGIGKSGAQPAKKRLNFGQTGDTESVPDPQPIGEPPAAPSGVGPNTMAAGGGAPMADNNEGADGVGSSSGNWHCDSTWLGDRXITTSTRTWALPTYNNHLYKQISSASTGASNDNHYFGYSTPWGYFDFNRFHCHFSPRDWQRLINNNWGFRPKRLNFKLFNIQVKEVTDNNGVKTIANNLTSTVQVFTDSEYQLPYVLGSAHQGCLPPFPADVFMIPQYGYLTLNNGSQAVGRSSFYCLEYFPSQMLRTGNNFTFSYTFEDVPFHSSYAHSQSLDRLMNPLIDQYLYYLSRTQTTGGTANTQTLGFSQGGPNTMANQAKNWLPGPCYRQQRVSTTTGQNNNSNFAWTAGTKYHLNGRNSLANPGIAMATHKDDKERFFPSNGILIFGKQNAARDNADYSDVMLTSEEEIKTTNPVATEEYGIVADNFQQQNTAPQIGTVNSQGALPGMVWQNRDVYLQGPIWAKIPHTDGNFHPSPLMGGFGLKHPPPQILIKNTPVPADPPTTFNQSKLNSFITQYSTGQVSVEIEWELQKENSKRWNPEIQYTSNYYKSTSVDFAVNTEGVYSEPHPIGTRYLTRPL

SEQ ID NO: 3492 - protein, 736 aa, Artificial Sequence
  Synthetic polypeptide
MAADGYLPDWLEDNLSEGIREWWALKPGAPKPKANQQKQDDGRGLVLPGYKYLGPFNGLDKGEPVNEADAAALEHDKAYDQQLKAGDNPYLKYNHADAEFQERLQEDTSFGGNLGRAVFQAKKRLLEPLGLVEEAAKTAPGKKRPVEQSPQEPDSSAGIGKSGAQPAKKRLNFGQTGDTESVPDPQPLGEPPATPAAVGPTTMASGGGAPMADNNEGADGVGNASGNWHCDSTWLGDRVITTSTRTWALPTYNNHLYKQISSASTGASNDNHYFGYSTPWGYFDFNRFHCHFSPRDWQRLINNNWGFRPKRLSFKLFNIQVKEVTQNEGTKTIANNLTSTIQVFTDSEYQLPYVLGSAHQGCLPPFPADVFMIPQYGYLTLNNGSQAVGRSSFYCLEYFPSQMLRTGNNFQFTYTFEDVPFHSSYAHSQSLDRLMNPLIDQYLYYLSRTQTTGGTANTQTLGFSQGGPNTMANQAKNWLPGPCYRQQRVSTTTGQNNNSNFAWTAGTKYHLNGRNSLANPGIAMATHKDDKERFFPSNGILIFGKQNAARDNADYSDVMLTSEEEIKTTNPVATEEYGIVADNLQQQNTAPQIGTVNSQGALPGMVWQNRDVYLQGPIWAKIPHTDGNFHPSPLMGGFGLKHPPPQILIKNTPVPADPPTTFNQSKLNSFITQYSTGQVSVEIEWELQKENSKRWNPEIQYTSNYYKSTSVDFAVNTEGVYSEPHPIGTRYLTRPL

SEQ ID NO: 3493 - protein, 736 aa, Artificial Sequence
  Synthetic polypeptide
MAADGYLPDWLEDTLSEGIRQWWKLKPGPPPPKPAERHKDDSRGLVLPGYKYLGPFNGLDKGEPVNEADAAALEHDKAYDQQLQAGDNPYLRYNHADAEFQERLQGDTSFGGNLGRAVFQAKKRLLEPLGLVEEAAKTAPGKKRPVEQSPQEPDSSAGIGKSGAQPAKKRLNFGQTGDTESVPDPQPIGEPPAAPSGVGSLTMASGGGAPVADNNEGADGVGSSSGNWHCDSQWLGDRVITTSTRTWALPTYNNHLYKQISSASTGASNDNHYFGYSTPWGYFDFNRFHCHFSPRDWQRLINNNWGFRPKRLSFKLFNIQVKEVTQNEGTKTIANNLTSTIQVFTDSEYQLPYVLGSAHQGCLPPFPADVFMIPQYGYLTLNNGSQAVGRSSFYCLEYFPSQMLRTGNNFQFTYTFEDVPFHSSYAHSQSLDRLMNPLIDQYLYYLSRTQTTGGTANTQTLGFSQGGPNTMANQAKNWLPGPCYRQQRVSTTTGQNNNSNFAWTAGTKYHLNGRNSLANPGIAMATHKDDKERFFPSNGILIFGKQNAARDNADYSDVMLTSEEEIKTTNPVATEEYGIVADNLQQQNTAPQIGTVNSQGALPGMVWQNRDVYLQGPIWAKIPHTDGNFHPSPLMGGFGLKHPPPQILIKNTPVPADPPTTFNQSKLNSFITQYSTGQVSVEIEWELQKENSKRWNPEIQYTSNYYKSTSVDFAVNTEGVYSEPHPIGTRYLTRPL

SEQ ID NO: 3494 - protein, 738 aa, Artificial Sequence
  Synthetic polypeptide
MAADGYLPDWLEDNLSEGIRQWWKLKPGPPPPKPAERHKDDSRGLVLPGYKYLGPFNGLDKGEPVNAADAAALEHDKAYDQQLKAGDNPYLRYNHADAEFQERLQEDTSFGGNLGRAVFQAKKRVLEPLGLVEEGAKTAPGKKRPVEPSPQRSPDSSTGIGKKGQQPAKKRLNFGQTGDSESVPDPQPLGEPPATPAAVGPTTMASGGGAPMADNNEGADGVGNASGNWHCDSTWLGDRVITTSTRTWALPTYNNHLYKQISNGTSGGSTNDNTYFGCVTPWGYFDFNKFHCHFSPDDWQRLINNGWGFRTKRLNFKLFSMKVKKGTDNTGIKTIANNLTNTVHVFADSEYQLPYVLGSAHQGCLPPFPADVFMIPQYGYLTLNNGSQAVGRSSFYCLEYFPSQMLRTGNNFTFSYTFEDVPFHSSYAHSQSLDRLMNPLIDQYLYYLSRTQTTGGTANTQTLGFSQGGPNTMANQAKNWLPGPCYRQQRVSTTTGQNNNSNFAWTAGTKYHLNGRNSLANPGIAMATHKDDKERFFPSNGILIFGKQNAARDNADYSDVMLTSEEEIKTTNPVATEEYGIVADNLQQQNTAPQIGTVNSQGALPGMVWQNRDVYLQGPIWAKIPHTDGNFHPSPLMGGFGLKHPPPQILIKNTPVPADPPTTFNQSKLNSFITQYSTGQVSVEIEWELQKENSKRWNPEIQYTSNYYKSTSVDFAVNTEGVYSEPHPIGTRYLTRPL

SEQ ID NO: 3495 - protein, 737 aa, Artificial Sequence
  Synthetic polypeptide
MAADGYLPDWLEDTLSEGIRQWWKLKPGPPPPKPAERHKDDSRGLVLPGYKYLGPFNGLDKGEPVNAADAAALEHDKAYDQQLKAGDNPYLRYNHADAEFQERLQEDTSFGGNLGRAVFQAKKRVLEPLGLVEEGAKTAPGKKRPVEPSPQRSPDSSTGIGKKGQQPAKKRLNFGQTGDSESVPDPQPIGEPPAGPSGLGSGTMAAGGGAPMADNNEGADGVGSSSGNWHCDSTWLGDRVITTSTRTWALPTYNNHLYKQISSASTGASNDNHYFGYSTPWGYFDFNRFHCHFSPRDWQRLINNNWGFRPKRLNFKLFNIQVKEVTDNNGVKTIANNLTSTVQVFTDSEYQLPYVLGSAHQGCLPPFPADVFMIPQYGYLTLNNGSQAVGRSSFYCLEYFPSQMLRTGNNFTFSYTFEDVPFHSSYAHSQSLDRLMNPLIDQYLYYLSRTQTTGGTANTQTLGFSQGGPNTMANQAKNWLPGPCYRQQRVSTTTGQNNNSNFAWTAGTKYHLNGRNSLANPGIAMATHKDDKERFFPSNGILIFGKQNAARDNADYSDVMLTSEEEIKTTNPVATEEYGIVADNLQQQNTAPQIGTVNSQGALPGMVWQNRDVYLQGPIWAKILHTDGNFHPSPLMGGFGMKHPPPPILIKNTPVPADPPTTFNQSKLNSFITQYSTGQVSVEIEWELPKENSKRWNPEIQYTSNYYKSTSVDFAVNTEGVYYEPHPIGTRYLTPPL

SEQ ID NO: 3496 - protein, 737 aa, Artificial Sequence
  Synthetic polypeptide
MAADGYLPDWLEDNLSEGIREWWALKPGAPKPKANQQKQDDGRGLVLPGYKYLGPFNGLDKGEPVNAADAAALEHDKAYDQQLKAGDNPYLRYNHADAEFQERLQEDTSFGGNLGRAVFQAKKRVLEPLGLVEEGAKTAPGKKRPVEPSPQRSPDSSTGIGKKGQQPARKRLNFGQTGDSESVPDPQPLGEPPAAPSGVAPNTMAAGGGAPMADNNEGADGVGNASGNWHCDSTWLGDRVITTSTRTWALPTYNNHLYKQISSASTGASNDNHYFGYSTPWGYFDFNRFHCHFSPRDWQRLITTIGGFRPKRLNFKLFNIQVKEVTDNNGVKTIANNLTSTVQVFTDSEYQLPYVLGSAHQGCLPPFPADVFMIPQYGYLTLNNGSQAVGRSSFYCLEYFPSQMLRTGNNFTFSYTFEDVPFHSSYAHSQSLDRLMNPLIDQYLYYLSRTQTTGGTANTQTLGFSQGGPNTMANQAKNWLPGPCYRQQRVSTTTGQNNNSNFAWTAGTKYHLNGRNSLANPGIAMATHKDDKERFFPSNGILIFGKQNAARDNADYSDVMLTSEEEIKTTNPVATEEYGIVADNLQQQNTAPQIGTVNSQGALPGMVWQNRDVYLQGPIWAKIPHTDGNFHPSPLMGGFGLKHPPPQILIKNTPVPADPPTTFNQSKLNSFITQYSTGQVSVEIEWELQKENSKRWNPEIQYTSNYYKSTSVDFAVNTEGVYSEPHPIGTRYLTRPL

SEQ ID NO: 3497 - protein, 736 aa, Artificial Sequence
  Synthetic polypeptide
MAADGYLPDWLEDTLSEGIRQWWKLKPGPPPPKPAERHKDDGRGLVLPGYKYLGPFNGLDKGEPVNAADAAALEHDKAYDQQLKAGDNPYLRYNHADAEFQERLQEDTSFGGNLGRAVFQAKKRVLEPLGLVEEPVKTAPGKKRPVEQSPQEPDSSSGIGKKGQQPAKKRLNFGQTGDSESVPDPQPLGEPPATPAAVGPTTMASGGGAPMADNNEGADGVGNASGNWHCDSTWMGDRVITTSTRTWALPTYNNHLYKQISSASTGASNDNHYFGYSTPWGYFDFNRFHCHFSPRDWQRLINNNWGFRPKRLNFKLFNIQVKEVTQNEGTKTIANNLTSTIQVFTDSEYQLPYVLGSAHQGCLPPFPADVFMIPQYGYLTLNNGSQAVGRSSFYCLEYFPSQMLRTGNNFQFTYTFEDVPFHSSYAHSQSLDRLMNPLIDQYLYYLSRTQTTGGTANTQTLGFSQGGPNTMANHAKNWLPGPCYRQQRVSTTTGQNNNSNFAWTAGTKYHLNGRNSLANPGIAMATHKDDKERFFPSNGILIFGKQNAARDNADYSDVMLTSEEEIKTTNPVATEEYGIVADNLQQQNTAPQIGTVNSQGALPGMVWQNRDVYLQGPIWAKIPHTDGNFHPSPLMGGFGLKHPPPQILIKNTPVPADPPTTFNQSKLNSFITQYSTGQVSVEIEWELQKENSKRWNPEIQYTSNYYKSTSVDFAVNTEGVYSEPHPIGTRYLTRPL

SEQ ID NO: 3498 - protein, 737 aa, Artificial Sequence
  Synthetic polypeptide
MAADGYLPDWLEDNLSQGIREWWDLKPGAPKPKANQQKQDDGRGLVLPGYKYLGPFNGLDKGEPVNAADAAALEHDKAYDQQLKAGDNPYLRYNHADAEFQERLQEDTSFGGNLGRAVFQAKKRVLEPLGLVEEGAKTAPGKKRPVEPSPQRSPDSSTGIGKKGQQPARKRLNFGQTGDSESVPDPQPLGEPPAAPAAVGPTTMASGGGAPMADNNEGADGVGSSSGNWHCDSQWLGDRVITTSTRTWALPTYNNHLYKQISSASTGASNDNHYFGYSTPWGYFDFNRFHCHFSPRDWQRLINNNWGFRPKRLSFKLFNIQVKEVTQNEGTKTIANNLTSTIQVFTDSEYQLPYVLGSAHQGCLPPFPADVFMIPQYGYLTLNNGSQAVGRSSFYCLEYFPSQMLRTGNNFQFTYTFEDVPFHSSYAHSQSLDRLMNPLIDQYLYYLSRTQTTGGTTNAQTLGFSQGGPNTMANQAKNWLPGPCYRQQRVSTTTGQNNNSNFAWTAGTKYHLNGRNSLANPGIAMATHKDDKERFFPSNGILIFGKQNAARDNADYSDVMLTSEEEIKTTNPVATEEYGIVADNLQQQNTAPQIGTVNSQGALPGMVWQNRDVYLQGPIWAKIPHTDGNFHPSPLMGGFGLKHPPPQILIKNTPVPADPPTTFNQSKLNSFITQYSTGQVSVEIEWELQKENSKRWNPEIQYTSNYYKSTNVDFAVNTEGVYSEPHPIGTRYLTRPL

SEQ ID NO: 3499 - protein, 736 aa, Artificial Sequence
  Synthetic polypeptide
MAADGYLPDWLEDNLSEGIREWWDLKPGAPKPKANQQKQDDGRGLVLPGYKYLGPFNGLDKGEPVNAADAAALEHDKAYDQQLKAGDNPYLRYNHADAEFQERLQEDTSFGGNLGRAVFQAKKRVLEPFGLVEEGAKTAPGKKRPVEQSPQEPDSSSGIGKTGQQPAKKRLNFGQTGDTESVPDPQPIGEPPAAPSGVGPNTMAAGGGAPMADNNEGADGVGSSSGNWHCDSTWMGDRVITTSTRTWALPTYNNHLYKQISSASTGASNDNHYFGYSTPWGYFDFNRFHCHFSPRDWQRLINNNWGFRPKRLNFKLFNIQVKEVTQNEGTKTIANNLTSTIQVFTDSEYQLPYVLGSAHQGCLPPFPADVFMIPQYGYLTLNNGSQAVGRSSFYCLEYFPSQMLRTGNNFQFTYTFEDVPFHSSYAHSQSLDRLMNPLIDQYLYYLSRTQTTGGTANTQTLGFSQGGPNTMANQAKNWLPGPCYRQQRVSTTTGQNNNSNFAWTAGTKYHLNGRNSLANPGIAMATHKDDKERFFPSNGILIFGKQNAARDNADYSDVMLTSEEEIKTTNPVATEEYGIVADNLQQQNTAPQIGTVNSQGALPGMVWQNRDVYLQGPIWAKIPHTDGNFHPSPLMGGFGLKHPPPQILIKNTPVPADPPTTFNQSKLNSFITQYSTGQVSVEIEWELQKENSKRWNPEIQYTSNYYKSTNVDFAVNTEGVYSEPHPIGTRYFTRPL

SEQ ID NO: 3500 - protein, 736 aa, Artificial Sequence
  Synthetic polypeptide
MAADGYLPDWLEDNLSEGIREWWDLKPGAPKPKANQQKQDDGRGLVLPGYKYLGPFNGLDKGEPVNAADAAALEHDKAYDQQLKAGDNPYLRYNHADAEFQERLQEDTSFGGNLGRAVFQAKKRVLEPLGLVEEGAKTAPGKKRPVEQSPQEPDSSSGIGKTGQQPAKKRLNFGQTGDSESVPDPQPLGEPPATPAAVGPTTMASGGGAPMADNNEGADGVGNSSGNWHCDSTWMGDRVITTSTRTWALPTYNNHLYKQISSASTGASNDNHYFGYSTPWGYFDFNRFHCHFSPRDWQRLINNNWGFRPKRLNFKLFNIQVKEVTDNNGVKTIANNLTSTVQVFTDSEYQLPYVLGSAHQGCLPPFPADVFMIPQYGYLTLNNGSQAVGRSSFYCLEYFPSQMLRTGNNFQFTYTFEDVPFHSSYAHSQSLDRLMNPLIDQYLYYLSRTQTTGGTANTQTLGFSQGGPNTMANQAKNWLPGPCYRQQRVSTTTGQNNNSNFAWTAGTKYHLNGRNSLANPGIAMATHKDDKERFFPSNGILIFGKQNAARDNADYSDVMLTSEEEIKTTNPVATEEYGIVADNLQQQNTAPQIGTVNSQGALPGMVWQNRDVYLQGPIWAKIPHTDGNFHPSPLMGGFGLKHPPPQILIKNTPVPADPPTTFNQSKLNSFITQYSTGQVSVEIEWELQKENSKRWNPEIQYTSNYYKSTNVDFAVNTEGVYSEPHPIGTRYLTRPL

SEQ ID NO: 3501 - protein, 736 aa, Artificial Sequence
  Synthetic polypeptide
MAADGYLPDWLEDNLSEGIREWWDLKPGAPKPKANQQKQDDGRGLVLPGYKYLGPFNGLDKGEPVNAADAAALEHDKAYDQQLKAGDNPYLRYNHADAEFQERLQEDTSFGGNLGRAVFQAKKRVLEPLGLVEEGAKTAPGKKRPVEQSPQEPDSSSGIGKTGQQPAKKRLNFGQTGDSESVPDPQPLGEPPATPAAVGPTTMASGGGAPMADNNEGADGVGNASGNWHCDSTWLGDRVITTSTRTWALPTYNNHLYKQISSASTGASNDNHYFGYSTPWGYFDFNRFHCHFSPRDWQRLINNNWGFRPKRLNFKLFNIQVKEVTQNEGTKTIANNLTSTIQVFTDSEYQLPYVLGSAHQGCLPPFPADVFMIPQYGYLTLNNGSQAVGRSSFYCLEYFPSQMLRTGNNFEFSYQFEDVPFHSSYAHSQSLDRLMNPLIDQYLYYLSRTQTTGGTANTQTLGFSQGGPNTMANQAKNWLPGPCYRQQRVSTTTGQNNNSNFAWTAGTKYHMNGRNSLVNPGIAMATHKDDKERFFPSNGILIFGKQNVARDNADYSDVMLTSEEEIKTTNPVATEEYGIVADNLQQQNTAPQIGTVNSQGALPGMVWQNRDVYLQGPIWAKIPHTDGNFHPSPLMGGFGLKHPPPQILIKNTPVPADPPTTFNQSKLNSFITQYSTGQVSVEIEWELQKENSKRWNPEIQYTSNYYKSTSVDFAVNTEGVYSEPHPIGTRYLTRPL

SEQ ID NO: 3502 - DNA, 2217 bp, Artificial Sequence
  Synthetic polynucleotide
atggctgccgatggttatcttccagattggctcgaggacaacctctctgagggcattcgcgagtggtgggcgctgaaacctggagccccgaagcccaaagccaaccagcaaaagcaggacgacggccggggtctggtgcttcctggctacaagtacctcggacccttcaacggactcgacaagggggagcccgtcaacgcggcggacgcagcggccctcgagcacgacaaggcctacgaccagcagctgcaggcgggtgacaatccgtacctgcggtataaccacgccgacgccgagtttcaggagcgtctgcaagaagatacgtcttttgggggcaacctcgggcgagcagtcttccaggccaagaagcgggttctcgaacctctcggtctggttgaggaaggcgctaagacggctcctggaaagaagagaccggtagagccatcaccccagcgttctccagactcctctacgggcatcggcaagaaaggccaacagcccgccagaaaaagactcaattttggtcagactggcgactcagagtcagttccagaccctcaacctctcggagaacctccagcagcgccctctggtgtgggacctaatacaatggctgcaggcggtggcgcaccaatggcagacaataacgaaggcgccgacggagtgggtagttcctcgggaaattggcattgcgattccacatggctgggcgacagagtcatcaccaccagcacccgaacctgggccctgcccacctacaacaaccacctctacaagcaaatctccaacgggacatcgggaggagccaccaacgacaacacctacttcggctacagcaccccctgggggtattttgactttaacagattccactgccacttttcaccacgtgactggcagcgactcatcaacaacaactggggattccggcccaagagactcagcttcaagctcttcaacatccaggtcaaggaggtcacgcagaatgaaggcaccaagaccatcgccaataacctcaccagcaccatccaggtgtttacggactcggagtaccagctgccgtacgttctcggctctgcccaccagggctgcctgcctccgttcccggcggacgtgttcatgattccccagtacggctacctaacactcaacaacggtagtcaggccgtgggacgctcctccttctactgcctggaatactttccttcgcagatgctgagaaccggcaacaacttccagtttacttacaccttcgaggacgtgcctttccacagcagctacgcccacagccagagcttggaccggctgatgaatcctctgattgaccagtacctgtactacttgtctcggactcaaacaacaggaggcacggcaaatacgcagactctgggcttcagccaaggtgggcctaatacaatggccaatcaggcaaagaactggctgccaggaccctgttaccgccaacaacgcgtctcaacgacaaccgggcaaaacaacaatagcaactttgcctggactgctgggaccaaataccatctgaatggaagaaattcattggctaatcctggcatcgctatggcaacacacaaagacgacgaggagcgtttttttcccagtaacgggatcctgatttttggcaaacaaaatgctgccagagacaatgcggattacagcgatgtcatgctcaccagcgaggaagaaatcaaaaccactaaccctgtggctacagaggaatacggtatcgtggcagataacttgcagcagcaaaacacggctcctcaaattggaactgtcaacagccagggggccttacccggtatggtttggcagaaccgggacgtgtacctgcagggtcccatctgggccaagattcctcacacggacggcaacttccacccgtctccgctgatgggcggctttggcctgaaacatcctccgcctcagatcctgatcaagaacacgcctgtacctgcggatcctccgaccaccttcaaccagtcaaagctgaactctttcatcacgcaatacagcaccggacaggtcagcgtggaaattgaatgggagctgcagaaggaaaacagcaagcgctggaaccccgagatccagtacacctccaactactacaaatctacaagtgtggactttgctgttaatacagaaggcgtgtactctgaaccccgccccattggcacccgttacctcacccgtaatctgtaa

SEQ ID NO: 3503 - protein, 738 aa, Artificial Sequence; identical to SEQ ID NO: 2493
  Synthetic polypeptide

SEQ ID NO: 3504 - protein, 735 aa, Artificial Sequence
  Synthetic polypeptide
MAADGYLPDWLEDNLSEGVREWWALQPGAPKPKANQQHQDNARGLVLPGYKYLGPGNGLDKGEPVNAADAAALEHDKAYDQQLKAGDNPYLKYNHADAEFQQRLQGDTSFGGNLGRAVFQAKKRVLEPLGLVEQAGETAPGKKRPLIESPQQPDSSTGIGKKGKQPAKKKLVFEDETGAGDGPPEGSTSGAMSDDSEMRAAAGGAAVEGGQGADGVGNASGDWHCDSTWSEGHVTTTSTRTWVLPTYNNHLYKRLGESLQSNTYNGFSTPWGYFDFNRFHCHFSPRDWQRLINNNWGMRPKAMRVKIFNIQVKEVTTSNGETTVANNLTSTVQIFADSSYELPYVMDAGQEGSLPPFPNDVFMVPQYGYCGLVTGNTSQQQTDRNAFYCLEYFPSQMLRTGNNFEITYSFEKVPFHSMYAHSQSLDRLMNPLIDQYLWGLQSTTTGTTLNAGTATTNFTKLRPTNFSNFKKNWLPGPSIKQQGFSKTANQNYKIPATGSDSLIKYETHSTLDGRWSALTPGPPMATAGPADSKFSNSQLIFAGPKQNGNTATVPGTLIFTSEEELAATNATDTDMWGNLPGGDQSNSNLPTVDRLTALGAVPGMVWQNRDIYYQGPIWAKIPHTDGHFHPSPLIGGFGLKHPPPQIFIKNTPVPANPATTFSSTPVNSFITQYSTGQVSVQIDWEIQKERSKRWNPEVQFTSNYGQQNSLLWAPDAAGKYTEPRAIGTRYLTHHL

SEQ ID NO: 3505 - protein, 735 aa, Artificial Sequence
  Synthetic polypeptide
MAADGYLPDWLEDNLSEGVREWWALQPGAPKPKANQQHQDNARGLVLPGYKYLGPGNGLDKGEPVNAADAAALEHDKAYDQQLKAGDNPYLKYNHADAEFQQRLQGDTSFGGNLGRAVFQAKKRVLEPLGLVEQAGETAPGKKRPLIESPQQPDSSTGIGKKGKQPAKKKLVFEDETGAGDGPPEGSTSGAMSDDSEMRAAAGGAAVEGGQGADGVGNASGDWHCDSTWSEGHVTTTSTRTWVLPTYNNHLYKRLGESLQSNTYNGFSTPWGYFDFNRFHCHFSPRDWQRLINNNWGMRPKAMRVKIFNIQVKEVTTSNGETTVANNLTSTVQIFADSSYELPYVMDAGQEGSLPPFPNDVFMVPQYGYCGLVTGNTSQQQTDRNAFYCLEYFPSQMLRTGNNFEITYSFEKVPFHSMYAHSQSLDRLMNPLIDQYLWGLQSTTTGTTLNAGTATTNFTKLRPTNFSNFKKNWLPGPSIKQQGFSKTANQNYLIPATGSDSLIRYETHSTLDGRWSALTPGPPMATAGPADSKFSNSQLIFAGPKQNGNTATVPGTLIFTSEEELAATNATDTDMWGNLPFRDLSSSNLPTVDRSTPLGAVPGMVWQNRDIYYQGPIWAKIPHTDGHFHPSPLIGGFGLKHPPPQIFIKNTPVPANPATTFSSTPVNSFITQYSTGQVSVQIDWEIQKERSKRWNPEVQFTSNYGQQNSLLWAPDAAGKYTEPRAIGTRYLTHHL

SEQ ID NO: 3506 - protein, 735 aa, Artificial Sequence
  Synthetic polypeptide
MAADGYLPDWLEDNLSEGVREWWALQPGAPKPKANQQHQDNARGLVLPGYKYLGPGNGLDKGEPVNAADAAALEHDKAYDQQLKAGDNPYLKYNHADAEFQQRLQGDTSFGGNLGRAVFQAKKRVLEPLGLVEQAGETAPGKKRPLIESPQQPDSSTGIGKKGKQPAKKKLVFEDETGAGDGPPEGSTSGAMSDDSEMRAAAGGAAVEGGQGADGVGNASGDWHCDSTWSEGHVTTTSTRTWVLPTYNNHLYKRLGESLQSNTYNGFSTPWGYFDFNRFHCHFSPRDWQRLINNNWGMRPKAMRVKIFNIQVKEVTTSNGETTVANNLTSTVQIFADSSYELPYVMDAGQEGSLPPFPNDVFMVPQYGYCGLVTGNTSQQQTDRNAFYCLEYFPSQMLRTGNNFEITYSFEKVPFHSMYAHSQSLDRLMNPLIDQYLWGLQSTTTGTTLNAGTATTNFTKLRPTNFSNFKKNWLPGPSIKQQGFSKTANQNYYIPATGSDSLILYETHSTLDGRWSALTPGPPMATAGPADSKFSNSQLIFAGPKQNGNTATVPGTLIFTSEEELAATNATDTDMWGNLPGGDQSNSNLPTVDRLTALGAVPGMVWQNRDIYYQGPIWAKIPHTDGHFHPSPLIGGFGLKHPPPQIFIKNTPVPANPATTFSSTPVNSFITQYSTGQVSVQIDWEIQKERSKRWNPEVQFTSNYGQQNSLLWAPDAAGKYTEPRAIGTRYLTHHL

SEQ ID NO: 3507 - protein, 735 aa, Artificial Sequence
  Synthetic polypeptide
MAADGYLPDWLEDNLSEGVREWWALQPGAPKPKANQQHQDNARGLVLPGYKYLGPGNGLDKGEPVNAADAAALEHDKAYDQQLKAGDNPYLKYNHADAEFQQRLQGDTSFGGNLGRAVFQAKKRVLEPLGLVEQAGETAPGKKRPLIESPQQPDSSTGIGKKGKQPAKKKLVFEDETGAGDGPPEGSTSGAMSDDSEMRAAAGGAAVEGGQGADGVGNASGDWHCDSTWSEGHVTTTSTRTWVLPTYNNHLYKRLGESLQSNTYNGFSTPWGYFDFNRFHCHFSPRDWQRLINNNWGMRPKAMRVKIFNIQVKEVTTSNGETTVANNLTSTVQIFADSSYELPYVMDAGQEGSLPPFPNDVFMVPQYGYCGLVTGNTSQQQTDRNAFYCLEYFPSQMLRTGNNFEITYSFEKVPFHSMYAHSQSLDRLMNPLIDQYLWGLQSTTTGTTLNAGTATTNFTKLRPTNFSNFKKNWLPGPSIKQQGFSKTANQNYGIPATGSDSLIKYETHSTLDGRWSALTPGPPIATAGPADSKFSNSQLIFAGPKQNGNTATVPGTLIFTSEEELAATNATDTDMWGNLPLYDASSSNLPTVDRLTLLGAVPGMVWQNRDIYYQGPIWAKIPHTDGHFHPSPLIGGFGLKHPPPQIFIKNTPVPANPATTFSSTPVNSFITQYSTGQVSVQIDWEIQKERSKRWNPEVQFTSNYGQQNSLLWAPDAAGKYTEPRAIGTRYLTHHL

SEQ ID NO: 3508 - protein, 735 aa, Artificial Sequence
  Synthetic polypeptide
MAADGYLPDWLEDNLSEGVREWWALQPGAPKPKANQQHQDNARGLVLPGYKYLGPGNGLDKGEPVNAADAAALEHDKAYDQQLKAGDNPYLKYNHADAEFQQRLQGDTSFGGNLGRAVFQAKKRVLEPLGLVEQAGETAPGKKRPLIESPQQPDSSTGIGKKGKQPAKKKLVFEDETGAGDGPPEGSTSGAMSDDSEMRAAAGGAAVEGGQGADGVGNASGDWHCDSTWSEGHVTTTSTRTWVLPTYNNHLYKRLGESLQSNTYNGFSTPWGYFDFNRFHCHFSPRDWQRLINNNWGMRPKAMRVKIFNIQVKEVTTSNGETTVANNLTSTVQIFADSSYELPYVMDAGQEGSLPPFPNDVFMVPQYGYCGLVTGNTSQQQTDRNAFYCLEYFPSQMLRTGNNFEITYSFEKVPFHSMYAHSQSLDRLMNPLIDQYLWGLQSTTTGTTLNAGTATTNFTKLRPTNFSNFKKNWLPGPSIKQQGFSKTANQNYTIPATGSDSLITYETHSTLDGRWSALTPGPPGATAGPADSKFSNSQLIFAGPKQNGNTATVPGTLIFTSEEELAATNATDTDMWGNLPRVDTSASNLPTVDRYTNLGAVPGMVWQNRDIYYQGPIWAKIPHTDGHFHPSPLIGGFGLKHPPPQIFIKNTPVPANPATTFSSTPVNSFITQYSTGQVSVQIDWEIQKERSKRWNPEVQFTSNYGQQNSLLWAPDAAGKYTEPRAIGTRYLTHHL

SEQ ID NO: 3509 - protein, 735 aa, Artificial Sequence
  Synthetic polypeptide
MAADGYLPDWLEDNLSEGVREWWALQPGAPKPKANQQHQDNARGLVLPGYKYLGPGNGLDKGEPVNAADAAALEHDKAYDQQLKAGDNPYLKYNHADAEFQQRLQGDTSFGGNLGRAVFQAKKRVLEPLGLVEQAGETAPGKKRPLIESPQQPDSSTGIGKKGKQPAKKKLVFEDETGAGDGPPEGSTSGAMSDDSEMRAAAGGAAVEGGQGADGVGNASGDWHCDSTWSEGHVTTTSTRTWVLPTYNNHLYKRLGESLQSNTYNGFSTPWGYFDFNRFHCHFSPRDWQRLINNNWGMRPKAMRVKIFNIQVKEVTTSNGETTVANNLTSTVQIFADSSYELPYVMDAGQEGSLPPFPNDVFMVPQYGYCGLVTGNTSQQQTDRNAFYCLEYFPSQMLRTGNNFEITYSFEKVPFHSMYAHSQSLDRLMNPLIDQYLWGLQSTTTGTTLNAGTATTNFTKLRPTNFSNFKKNWLPGPSIKQQGFSKTANQNYSIPATGSDSLIKYETHSTLDGRWSALTPGPPFATAGPADSKFSNSQLIFAGPKQNGNTATVPGTLIFTSEEELAATNATDTDMWGNLPDYDSSLSNLPTVDRDTTLGAVPGMVWQNRDIYYQGPIWAKIPHTDGHFHPSPLIGGFGLKHPPPQIFIKNTPVPANPATTFSSTPVNSFITQYSTGQVSVQIDWEIQKERSKRWNPEVQFTSNYGQQNSLLWAPDAAGKYTEPRAIGTRYLTHHL

SEQ ID NO: 3510 - protein, 735 aa, Artificial Sequence
  Synthetic polypeptide
MAADGYLPDWLEDNLSEGVREWWALQPGAPKPKANQQHQDNARGLVLPGYKYLGPGNGLDKGEPVNAADAAALEHDKAYDQQLKAGDNPYLKYNHADAEFQQRLQGDTSFGGNLGRAVFQAKKRVLEPLGLVEQAGETAPGKKRPLIESPQQPDSSTGIGKKGKQPAKKKLVFEDETGAGDGPPEGSTSGAMSDDSEMRAAAGGAAVEGGQGADGVGNASGDWHCDSTWSEGHVTTTSTRTWVLPTYNNHLYKRLGESLQSNTYNGFSTPWGYFDFNRFHCHFSPRDWQRLINNNWGMRPKAMRVKIFNIQVKEVTTSNGETTVANNLTSTVQIFADSSYELPYVMDAGQEGSLPPFPNDVFMVPQYGYCGLVTGNTSQQQTDRNAFYCLEYFPSQMLRTGNNFEITYSFEKVPFHSMYAHSQSLDRLMNPLIDQYLWGLQSTTTGTTLNAGTATTNFTKLRPTNFSNFKKNWLPGPSIKQQGFSKTANQNYSIPATGSDSLIWYETHSTLDGRWSALTPGPPCATAGPADSKFSNSQLIFAGPKQNGNTATVPGTLIFTSEEELAATNATDTDMWGNLPQGDSSLSNLPTVDRMTVLGAVPGMVWQNRDIYYQGPIWAKIPHTDGHFHPSPLIGGFGLKHPPPQIFIKNTPVPANPATTFSSTPVNSFITQYSTGQVSVQIDWEIQKERSKRWNPEVQFTSNYGQQNSLLWAPDAAGKYTEPRAIGTRYLTHHL

SEQ ID NO: 3511 - protein, 735 aa, Artificial Sequence
  Synthetic polypeptide
MAADGYLPDWLEDNLSEGVREWWALQPGAPKPKANQQHQDNARGLVLPGYKYLGPGNGLDKGEPVNAADAAALEHDKAYDQQLKAGDNPYLKYNHADAEFQQRLQGDTSFGGNLGRAVFQAKKRVLEPLGLVEQAGETAPGKKRPLIESPQQPDSSTGIGKKGKQPAKKKLVFEDETGAGDGPPEGSTSGAMSDDSEMRAAAGGAAVEGGQGADGVGNASGDWHCDSTWSEGHVTTTSTRTWVLPTYNNHLYKRLGESLQSNTYNGFSTPWGYFDFNRFHCHFSPRDWQRLINNNWGMRPKAMRVKIFNIQVKEVTTSNGETTVANNLTSTVQIFADSSYELPYVMDAGQEGSLPPFPNDVFMVPQYGYCGLVTGNTSQQQTDRNAFYCLEYFPSQMLRTGNNFEITYSFEKVPFHSMYAHSQSLDRLMNPLIDQYLWGLQSTTTGTTLNAGTATTNFTKLRPTNFSNFKKNWLPGPSIKQQGFSKTANQNYCIPATGSDSLIRYETHSTLDGRWSALTPGPPLATAGPADSKFSNSQLIFAGPKQNGNTATVPGTLIFTSEEELAATNATDTDMWGNLPYKDSSRSNLPTVDRETSLGAVPGMVWQNRDIYYQGPIWAKIPHTDGHFHPSPLIGGFGLKHPPPQIFIKNTPVPANPATTFSSTPVNSFITQYSTGQVSVQIDWEIQKERSKRWNPEVQFTSNYGQQNSLLWAPDAAGKYTEPRAIGTRYLTHHL

SEQ ID NO: 3512 - protein, 735 aa, Artificial Sequence
  Synthetic polypeptide
MAADGYLPDWLEDNLSEGVREWWALQPGAPKPKANQQHQDNARGLVLPGYKYLGPGNGLDKGEPVNAADAAALEHDKAYDQQLKAGDNPYLKYNHADAEFQQRLQGDTSFGGNLGRAVFQAKKRVLEPLGLVEQAGETAPGKKRPLIESPQQPDSSTGIGKKGKQPAKKKLVFEDETGAGDGPPEGSTSGAMSDDSEMRAAAGGAAVEGGQGADGVGNASGDWHCDSTWSEGHVTTTSTRTWVLPTYNNHLYKRLGESLQSNTYNGFSTPWGYFDFNRFHCHFSPRDWQRLINNNWGMRPKAMRVKIFNIQVKEVTTSNGETTVANNLTSTVQIFADSSYELPYVMDAGQEGSLPPFPNDVFMVPQYGYCGLVTGNTSQQQTDRNAFYCLEYFPSQMLRTGNNFEITYSFEKVPFHSMYAHSQSLDRLMNPLIDQYLWGLQSTTTGTTLNAGTATTNFTKLRPTNFSNFKKNWLPGPSIKQQGFSKTANQNYIIPATGSDSLIYYETHSTLDGRWSALTPGPPRATAGPADSKFSNSQLIFAGPKQNGNTATVPGTLIFTSEEELAATNATDTDMWGNLPWIDNSRSNLPTVDRPTSLGAVPGMVWQNKNIYYQGPIWAKIPHTDGHFHPSPLIGGFGLKHPPPQIFIKNTPVPANPATTFTSTPVNSFITQYSTGQVSVQIDWEIQKERSKRWNPEVQFTSNYGQQNSLLWAPDAAGKYTEPRAIGTRYLTHHL

SEQ ID NO: 3513 - protein, 735 aa, Artificial Sequence
  Synthetic polypeptide
MAADGYLPDWLEDNLSEGVREWWALQPGAPKPKANQQHQDNARGLVLPGYKYLGPGNGLDKGEPVNAADAAALEHDKAYDQQLKAGDNPYLKYNHADAEFQQRLQGDTSFGGNLGRAVFQAKKRVLEPLGLVEQAGETAPGKKRPLIESPQQPDSSTGIGKKGKQPAKKKLVFEDETGAGDGPPEGSTSGAMSDDSEMRAAAGGAAVEGGQGADGVGNASGDWHCDSTWSEGHVTTTSTRTWVLPTYNNHLYKRLGESLQSNTYNGFSTPWGYFDFNRFHCHFSPRDWQRLINNNWGMRPKAMRVKIFNIQVKEVTTSNGETTVANNLTSTVQIFADSSYELPYVMDAGQEGSLPPFPNDVFMVPQYGYCGLVTGNTSQQQTDRNAFYCLEYFPSQMLRTGNNFEITYSFEKVPFHSMYAHSQSLDRLMNPLIDQYLWGLQSTTTGTTLNAGTATTNFTKLRPTNFSNFKKNWLPGPSIKQQGFSKTANQNYGIPATGSDSLIIYETHSTLDGRWSALTPGPPRATAGPADSKFSNSQLIFAGPKQNGNTATVPGTLIFTSEEELAATNATDTDMWGNLPGGDQSNSNLPTVDRLTALGAVPGMVWQNRDIYYQGPIWAKIPHTDGHFHPSPLIGGFGLKHPPPQIFIKNTPVPANPATTFSSTPVNSFITQYSTGQVSVQIDWEIQKERSKRWNPEVQFTSNYGQQNSLLWAPDAAGKYTEPRAIGTRYLTHHL

SEQ ID NO: 3514 - protein, 735 aa, Artificial Sequence
  Synthetic polypeptide
MAADGYLPDWLEDNLSEGVREWWALQPGAPKPKANQQHQDNARGLVLPGYKYLGPGNGLDKGEPVNAADAAALEHDKAYDQQLKAGDNPYLKYNHADAEFQQRLQGDTSFGGNLGRAVFQAKKRVLEPLGLVEQAGETAPGKKRPLIESPQQPDSSTGIGKKGKQPAKKKLVFEDETGAGDGPPEGSTSGAMSDDSEMRAAAGGAAVEGGQGADGVGNASGDWHCDSTWSEGHVTTTSTRTWVLPTYNNHLYKRLGESLQSNTYNGFSTPWGYFDFNRFHCHFSPRDWQRLINNNWGMRPKAMRVKIFNIQVKEVTTSNGETTVANNLTSTVQIFADSSYELPYVMDAGQEGSLPPFPNDVFMVPQYGYCGLVTGNTSQQQTDRNAFYCLEYFPSQMLRTGNNFEITYSFEKVPFHSMYAHSQSLDRLMNPLIDQYLWGLQSTTTGTTLNAGTATTNFTKLRPTNFSNFKKNWLPGPSIKQQGFSKTANQNYVIPATESDSLIYYETHSTLDGRWSALTPGPPYATAGPADSKFSNSQLIFAGPKQNGNTATVPGTLIFTSEEELAATNATDTDMWGNLPPRDDSTSNLPTVDRKTYLGAVPGMVWQNRDIYYQGPIWAKIPHTDGHFHPSPLIGGFGLKHPPPQIFIKNTPVPANPATTFSSTPVNSFITQYSTGQVSVQIDWEIQKERSKRWNPEVQFTSNYGQQNSLLWAPDAAGKYTEPRAIGTRYLTHHL

SEQ ID NO: 3515 - protein, 735 aa, Artificial Sequence
  Synthetic polypeptide
MAADGYLPDWLEDNLSEGVREWWALQPGAPKPKANQQHQDNARGLVLPGYKYLGPGNGLDKGEPVNAADAAALEHDKAYDQQLKAGDNPYLKYNHADAEFQQRLQGDTSFGGNLGRAVFQAKKRVLEPLGLVEQAGETAPGKKRPLIESPQQPDSSTGIGKKGKQPAKKKLVFEDETGAGDGPPEGSTSGAMSDDSEMRAAAGGAAVEGGQGADGVGNASGDWHCDSTWSEGHVTTTSTRTWVLPTYNNHLYKRLGESLQSNTYNGFSTPWGYFDFNRFHCHFSPRDWQRLINNNWGMRPKAMRVKIFNIQVKEVTTSNGETTVANNLTSTVQIFADSSYELPYVMDAGQEGSLPPFPNDVFMVPQYGYCGLVTGNTSQQQTDRNAFYCLEYFPSQMLRTGNNFEITYSFEKVPFHSMYAHSQSLDRLMNPLIDQYLWGLQSTTTGTTLNAGTATTNFTKLRPTNFSNFKKNWLPGPSIKQQGFSKTANQNYYIPATGSDSLIIYETHSTLDGRWSALTPGPPIATAGPADSKFSNSQLIFAGPKQNGNTATVPGTLIFTSEEELAATNSTDTDMWGNLPTDDDSRSNLPTVDRMTLLGAVPGMVWQNRDIYYQGPIWAKIPHTDGHFHPSPLIGGFGLKHPPPQIFIKNTPVPANPATTFSSTPVNSFITQYSTGQVSVQIDWEIQKERSKRWNPEVQFTSNYGQQNSLLWAPDAAGKYTEPRAIGTRYLTHHL

SEQ ID NO: 3516 - protein, 735 aa, Artificial Sequence
  Synthetic polypeptide
MAADGYLPDWLEDNLSEGVREWWALQPGAPKPKANQQHQDNARGLVLPGYKYLGPGNGLDKGEPVNAADAAALEHDKAYDQQLKAGDNPYLKYNHADAEFQQRLQGDTSFGGNLGRAVFQAKKRVLEPLGLVEQAGETAPGKKRPLIESPQQPDSSTGIGKKGKQPAKKKLVFEDETGAGDGPPEGSTSGAMSDDSEMRAAAGGAAVEGGQGADGVGNASGDWHCDSTWSEGHVTTTSTRTWVLPTYNNHLYKRLGESLQSNTYNGFSTPWGYFDFNRFHCHFSPRDWQRLINNNWGMRPKAMRVKIFNIQVKEVTTSNGETTVANNLTSTVQIFADSSYELPYVMDAGQEGSLPPFPNDVFMVPQYGYCGLVTGNTSQQQTDRNAFYCLEYFPSQMLRTGNNFEITYSFEKVPFHSMYAHSQSLDRLMNPLIDQYLWGLQSTTTGTTLNAGTATTNFTKLRPTNFSNFKKNWLPGPSIKQQGFSKTANQNYHIPATGSDSLIYYETHSTLDGRWSALTPGPPSATAGPADSKFSNSQLIFAGPKQNGNTATVPGTLIFTSEEELAATNATDTDMWGNLPRRDSSVSNLPTVDRYTDLGAVPGMVWQNRDIYYQGPIWAKIPHTDGHFHPSPLIGGFGLKHPPPQIFIKNTPVPANPATTFSSTPVNSFITQYSTGQVSVQIDWEIQKERSKRWNPEVQFTSNYGQQNSLLWAPDAAGKYTEPRAIGTRYLTHHL

SEQ ID NO: 3517 - protein, 735 aa, Artificial Sequence
  Synthetic polypeptide
MAADGYLPDWLEDNLSEGVREWWALQPGAPKPKANQQHQDNARGLVLPGYKYLGPGNGLDKGEPVNAADAAALEHDKAYDQQLKAGDNPYLKYNHADAEFQQRLQGDTSFGGNLGRAVFQAKKRVLEPLGLVEQAGETAPGKKRPLIESPQQPDSSTGIGKKGKQPAKKKLVFEDETGAGDGPPEGSTSGAMSDDSEMRAAAGGAAVEGGQGADGVGNASGDWHCDSTWSEGHVTTTSTRTWVLPTYNNHLYKRLGESLQSNTYNGFSTPWGYFDFNRFHCHFSPRDWQRLINNNWGMRPKAMRVKIFNIQVKEVTTSNGETTVANNLTSTVQIFADSSYELPYVMDAGQEGSLPPFPNDVFMVPQYGYCGLVTGNTSQQQTDRNAFYCLEYFPSQMLRTGNNFEITYSFEKVPFHSMYAHSQSLDRLMNPLIDQYLWGLQSTTTGTTLNAGTATTNFTKLRPTNFSNFKKNWLPGPSIKQQGFSKTANQNYSIPATGSDSLISYETHSTLDGRWSALTPGPPRATAGPADSKFSNSQLIFAGPKQNGNTATVPGTLIFTSEEELAATNATDTDMWGNLPRHDSSLSNLPTVDRNTGLGAVPGMVWQNRDIYYQGPIWAKIPHTDGHFHPSPLIGGFGLKHPPPQIFIKNTPVPANPATTFSSTPVNSFITQYSTGQVSVQIDWEIQKERSKRWNPEVQFTSNYGQQNSLLWAPDAAGKYTEPRAIGTRYLTHHL

SEQ ID NO: 3518 - protein, 735 aa, Artificial Sequence
  Synthetic polypeptide
MAADGYLPDWLEDNLSEGVREWWALQPGAPKPKANQQHQDNARGLVLPGYKYLGPGNGLDKGEPVNAADAAALEHDKAYDQQLKAGDNPYLKYNHADAEFQQRLQGDTSFGGNLGRAVFQAKKRVLEPLGLVEQAGETAPGKKRPLIESPQQPDSSTGIGKKGKQPAKKKLVFEDETGAGDGPPEGSTSGAMSDDSEMRAAAGGAAVEGGQGADGVGNASGDWHCDSTWSEGHVTTTSTRTWVLPTYNNHLYKRLGESLQSNTYNGFSTPWGYFDFNRFHCHFSPRDWQRLINNNWGMRPKAMRVKIFNIQVKEVTTSNGETTVANNLTSTVQIFADSSYELPYVMDAGQEGSLPPFPNDVFMVPQYGYCGLVTGNTSQQQTDRNAFYCLEYFPSQMLRTGNNFEITYSFEKVPFHSMYAHSQSLDRLMNPLIDQYLWGLQSTTTGTTLNAGTATTNFTKLRPTNFSNFKKNWLPGPSIKQQGFSKTANQNYFIPATGSDSLIRYETHSTLDGRWSALTPGPPLATAGPADSKFSNSQLIFAGPKQNGNTATVPGTLIFTSEEELAATNATDTDMWGNLPVIDFSKSNLPTVDRLTHLGAVPGMVWQNRDIYYQGPIWAKIPHTDGHFHPSPLIGGFGLKHPPPQIFIKNTPVPANPATTFSSTPVNSFITQYSTGQVSVQIDWEIQKERSKRWNPEVQFTSNYGQQNSLLWAPDAAGKYTEPRAIGTRYLTHHL

SEQ ID NO: 3519 - protein, 735 aa, Artificial Sequence
  Synthetic polypeptide
MAADGYLPDWLEDNLSEGVREWWALQPGAPKPKANQQHQDNARGLVLPGYKYLGPGNGLDKGEPVNAADAAALEHDKAYDQQLKAGDNPYLKYNHADAEFQQRLQGDTSFGGNLGRAVFQAKKRVLEPLGLVEQAGETAPGKKRPLIESPQQPDSSTGIGKKGKQPAKKKLVFEDETGAGDGPPEGSTSGAMSDDSEMRAAAGGAAVEGGQGADGVGNASGDWHCDSTWSEGHVTTTSTRTWVLPTYNNHLYKRLGESLQSNTYNGFSTPWGYFDFNRFHCHFSPRDWQRLINNNWGMRPKAMRVKIFNIQVKEVTTSNGETTVANNLTSTVQIFADSSYELPYVMDAGQEGSLPPFPNDVFMVPQYGYCGLVTGNTSQQQTDRNAFYCLEYFPSQMLRTGNNFEITYSFEKVPFHSMYAHSQSLDRLMNPLIDQYLWGLQSTTTGTTLNAGTATTNFTKLRPTNFSNFKKNWLPGPSIKQQGFSKTANQNYKIPATGSDSLIKYETHSTLDGRWSALTPGPPMATAGPADSKFSNSQLIFAGPKQNGNTATVPGTLIFTSEEELAATNATDTDMWGNLPVRDFSLSNLPTVDRTTKLGAVPGMVWQNRDIYYQGPIWAKIPHTDGHFHPSPLIGGFGLKHPPPQIFIKNTPVPANPATTFSSTPVNSFITQYSTGQVSVQIDWEIQKERSKRWNPEVQFTSNYGQQNSLLWAPDAAGKYTEPRAIGTRYLTHHL

SEQ ID NO: 3520 - protein, 735 aa, Artificial Sequence
  Synthetic polypeptide
MAADGYLPDWLEDNLSEGVREWWALQPGAPKPKANQQHQDNARGLVLPGYKYLGPGNGLDKGEPVNAADAAALEHDKAYDQQLKAGDNPYLKYNHADAEFQQRLQGDTSFGGNLGRAVFQAKKRVLEPLGLVEQAGETAPGKKRPLIESPQQPDSSTGIGKKGKQPAKKKLVFEDETGAGDGPPEGSTSGAMSDDSEMRAAAGGAAVEGGQGADGVGNASGDWHCDSTWSEGHVTTTSTRTWVLPTYNNHLYKRLGESLQSNTYNGFSTPWGYFDFNRFHCHFSPRDWQRLINNNWGMRPKAMRVKIFNIQVKEVTTSNGETTVANNLTSTVQIFADSSYELPYVMDAGQEGSLPPFPNDVFMVPQYGYCGLVTGNTSQQQTDRNAFYCLEYFPSQMLRTGNNFEITYSFEKVPFHSMYAHSQSLDRLMNPLIDQYLWGLQSTTTGTTLNAGTATTNFTKLRPTNFSNFKKNWLPGPSIKQQGFSKTANQNYFIPATGSDSLIQYETHSTLDGRWSALTPGPPMATAGPADSKFSNSQLIFAGPKQNGNTATVPGTLIFTSEEELAATNATDTDMWGNLPGGDQSNSNLPTVDRLTALGAVPGMVWQNRDIYYQGPIWAKIPHTDGHFHPSPLIGGFGLKHPPPQIFIKNTPVPANPATTFSSTPVNSFITQYSTGQVSVQIDWEIQKERSKRWNPEVQFTSNYGQQNSLLWAPDAAGKYTEPRAIGTRYLTHHL

SEQ ID NO: 3521 - protein, 735 aa, Artificial Sequence
  Synthetic polypeptide
MAADGYLPDWLEDNLSEGVREWWALQPGAPKPKANQQHQDNARGLVLPGYKYLGPGNGLDKGEPVNAADAAALEHDKAYDQQLKAGDNPYLKYNHADAEFQQRLQGDTSFGGNLGRAVFQAKKRVLEPLGLVEQAGETAPGKKRPLIESPQQPDSSTGIGKKGKQPAKKKLVFEDETGAGDGPPEGSTSGAMSDDSEMRAAAGGAAVEGGQGADGVGNASGDWHCDSTWSEGHVTTTSTRTWVLPTYNNHLYKRLGESLQSNTYNGFSTPWGYFDFNRFHCHFSPRDWQRLINNNWGMRPKAMRVKIFNIQVKEVTTSNGETTVANNLTSTVQIFADSSYELPYVMDAGQEGSLPPFPNDVFMVPQYGYCGLVTGNTSQQQTDRNAFYCLEYFPSQMLRTGNNFEITYSFEKVPFHSMYAHSQSLDRLMNPLIDQYLWGLQSTTTGTTLNAGTATTNFTKLRPTNFSNFKKNWLPGPSIKQQGFSKTANQNYEMPATGSDSLIIYETHSTLDGRWSALTPGPPFATAGPADSKFSNSQLIFAGPKQNGNTATVPGTLIFTSEEELAATNATDTDVWGNLPSGDHSQSNLPTVDRPTMLGAVPGMVWQNRDIYYQGPIWAKIPHTDGHFHPSPLIGGFGLKHPPPQIFIKNTPVPANPATTFISTPVNSFITQYSTGQVSVHIDWEIQKERSKRWNPEVQFTSDYGQHSSLLWAPDAAGKYTEPTAIGTRYLTHHL

SEQ ID NO: 3522 - protein, 734 aa, Artificial Sequence
  Synthetic polypeptide
MAADGYLPDWLEDNLSEGVREWWALQPGAPKPKANQQHQDNARGLVLPGYKYLGPGNGLDKGEPVNAADAAALEHDKAYDQQLKAGDNPYLKYNHADAEFQQRLQGDTSFGGNLGRAVFQAKKRVLEPLGLVEQAGETAPGKKRPLIESPQQPDSSTGIGKKGKQPAKKKLVFEDETGAGDGPPEGSTSGAMSDDSEMRAAAGGAAVEGGQGADGVGNASGDWHCDSTWSEGHVTTTSTRTWVLPTYNNHLYKRLGESLQSNTYNGFSTPWGYFDFNRFHCHFSPRDWQRLINNNWGMRPKAMRVKIFNIQVKEVTTSNGETTVANNLTSTVQIFADSSYELPYVMDAGQEGSLPPFPNDVFMVPQYGYCGLVTGNTSQQQTDRNAFYCLEYFPSQMLRTGNNFEITYSFEKVPFHSMYAHSQSLDRLMNPLIDQYLWGLQSTTTGTTLNAGTATTNFTKLRPTNFSNFKKNWLPGPSIKQQGFSKTANQNDIPATGSDSLIKYETHSTLDGRWSALTPGPPMATAGPADSKFSNSQLIFAGPKQNGNTATVPGTLIFTSEEELAATNATDTDMWGNLPGGDQSNSNLPTVDRLTALGAVPGMVWQNRDIYYQGPIWAKIPHTDGHFHPSPLIGGFGLKHPPPQIFIKNTPVPANPATTFSSTPVNSFITQYSTGQVSVQIDWEIQKERSKRWNPEVQFTSNYGQQNSLLWAPDAAGKYTEPRAIGTRYLTHHL

SEQ ID NO: 3523 - protein, 735 aa, Artificial Sequence
  Synthetic polypeptide
MAADGYLPDWLEDNLSEGVREWWALQPGAPKPKANQQHQDNARGLVLPGYKYLGPGNGLDKGEPVNAADAAALEHDKAYDQQLKAGDNPYLKYNHADAEFQQRLQGDTSFGGNLGRAVFQAKKRVLEPLGLVEQAGETAPGKKRPLIESPQQPDSSTGIGKKGKQPAKKKLVFEDETGAGDGPPEGSTSGAMSDDSEMRAAAGGAAVEGGQGADGVGNASGDWHCDSTWSEGHVTTTSTRTWVLPTYNNHLYKRLGESLQSNTYNGFSTPWGYFDFNRFHCHFSPRDWQRLINNNWGMRPKAMRVKIFNIQVKEVTTSNGETTVANNLTSTVQIFADSSYELPYVMDAGQEGSLPPFPNDVFMVPQYGYCGLVTGNTSQQQTDRNAFYCLEYFPSQMLRTGNNFEITYSFEKVPFHSMYAHSQSLDRLMNPLIDQYLWGLQSTTTGTTLNAGTATTNFTKLRPTNFSNFKKNWLPGPSIKQQGFSKTANQNYIIPATGSDSLITYETHSTLDGRWSALTPGPPVATAGPADSKFSNSQLIFAGPKQNGNTATVPGTLIFTSEEELAATNATDTDMWGNLPFNDDSSSNLPTVDRSTFLGAVPGMVWQNRDIYYQGPIWAKIPHTDGHFHPSPLIGGFGLKHPPPQIFIKNTPVPANPATTFSSTPVNSFITQYSTGQVSVQIDWEIQKERSKRWNPEVQFTSNYGQQNSLLWAPDAAGKYTEPRAIGTRYLTHHL

SEQ ID NO: 3524 - protein, 733 aa, Artificial Sequence
  Synthetic polypeptide
MAADGYLPDWLEDNLSEGIREWWDLKPGAPKPKANQQKQDDGRGLVLPGYKYLGPFNGLDKGEPVNAADAAALEHDKAYDQQLKAGDNPYLRYNHADAEFQERLQEDTSFGGNLGRAVFQAKKRVLEPLGLVEEGAKTAPGKKRPLESPQEPDSSSGIGKKGKQPARKRLNFEEDTGAGDGPPEGSDTSAMSSDIEMRAAPGGNAVDAGQGSDGVGNASGDWHCDSTWSEGKVTTTSTRTWVLPTYNNHLYLRLGTTSSSNTYNGFSTPWGYFDFNRFHCHFSPRDWQRLINNNWGLRPKAMRVKIFNIQVKEVTTSNGETTVANNLTSTVQIFADSSYELPYVMDAGQEGSLPPFPNDVFMVPQYGYCGIVTGENQNQTDRNAFYCLEYFPSQMLRTGNNFEMAYNFEKVPFHSMYAHSQSLDRLMNPLLDQYLWHLQSTTSGETLNQGNAATTFGKIRSGDFAFYRKNWLPGPCVKQQRFSKTASQNYKIPASGGNALLKYDTHYTLNNRWSNIAPGPPMATAGPSDGDFSNAQLIFPGPSVTGNTTTSANNLLFTSEEEIAATNPRDTDMFGQIADNNQNATTAPITGNVTAMGVLPGMVWQNRDIYYQGPIWAKIPHADGHFHPSPLIGGFGLKHPPPQIFIKNTPVPANPATTFTAARVDSFITQYSTGQVAVQIEWEIEKERSKRWNPEVQFTSNYGNQSSMLWAPDTTGKYTEPRVIGSRYLTNHL

SEQ ID NO: 3525 - protein, 742 aa, Artificial Sequence; identical to SEQ ID NO: 3336
  Synthetic polypeptide

SEQ ID NO: 3526 - protein, 733 aa, Artificial Sequence; identical to SEQ ID NO: 2809
  Synthetic polypeptide

SEQ ID NO: 3527 - protein, 733 aa, Artificial Sequence; identical to SEQ ID NO: 2526
  Synthetic polypeptide

SEQ ID NO: 3528 - protein, 733 aa, Artificial Sequence; identical to SEQ ID NO: 2813
  Synthetic polypeptide

SEQ ID NO: 3529 - protein, 735 aa, Artificial Sequence
  Synthetic polypeptide
MAADGYLPDWLEDNLSEGVREWWALQPGAPKPKANQQHQDNARGLVLPGYKYLGPGNGLDKGEPVNAADAAALEHDKAYDQQLKAGDNPYLKYNHADAEFQQRLQGDTSFGGNLGRAVFQAKKRVLEPLGLVEQAGETAPGKKRPLIESPQQPDSSTGIGKKGKQPAKKKLVFEDETGAGDGPPEGSTSGAMSDDSEMRAAAGGAAVEGGQGADGVGNASGDWHCDSTWSEGHVTTTSTRTWVLPTYNNHLYKRLGESLQSNTYNGFSTPWGYFDFNRFHCHFSPRDWQRLINNNWGMRPKAMRVKIFNIQVKEVTTSNGETTVANNLTSTVQIFADSSYELPYVMDAGQEGSLPPFPNDVFMVPQYGYCGLVTGNTSQQQTDRNAFYCLEYFPSQMLRTGNNFEITYSFEKVPFHSMYAHSQSLDRLMNPLIDQYLWGLQSTTTGTTLNAGTATTNFTKLRPTNFSNFKKNWLPGPSIKQQGFSKTANQNYEIPATGSDSLIEYETHSTLDGRWSALTPGPPMATAGPADSKFSNSQLIFAGPKQNGNTATVPGTLIFTSEEELAATNATDTDMWGNLPGGDQSSSNLPTVDRLTALGAVPGMVWQNRDIYYQGPIWAKIPHTDGHFHPSPLIGGFGLKHPPPQIFIKNTPVPANPATTFSSTPVNSFITQYSTGQVSVQIDWEIQKERSKRWNPEVQFTSNYGQQNSLLWAPDAAGKYTEPRAIGTRYLTHHL

SEQ ID NO: 3530 - protein, 735 aa, Artificial Sequence
  Synthetic polypeptide
MAADGYLPDWLEDNLSEGVREWWALQPGAPKPKANQQHQDNARGLVLPGYKYLGPGNGLDKGEPVNAADAAALEHDKAYDQQLKAGDNPYLKYNHADAEFQQRLQGDTSFGGNLGRAVFQAKKRVLEPLGLVEQAGETAPGKKRPLIESPQQPDSSTGIGKKGKQPAKKKLVFEDETGAGDGPPEGSTSGAMSDDSEMRAAAGGAAVEGGQGADGVGNASGDWHCDSTWSEGHVTTTSTRTWVLPTYNNHLYKRLGESLQSNTYNGFSTPWGYFDFNRFHCHFSPRDWQRLINNNWGMRPKAMRVKIFNIQVKEVTTSNGETTVANNLTSTVQIFADSSYELPYVMDAGQEGSLPPFPNDVFMVPQYGYCGLVTGNTSQQQTDRNAFYCLEYFPSQMLRTGNNFEITYSFEKVPFHSMYAHSQSLDRLMNPLIDQYLWGLQSTTTGTTLNAGTATTNFTKLRPTNFSNFKKNWLPGPSIKQQGFSKTANQNYEIPATGSDSLIEYETHSTLDGRWSALTPGPPMATAGPADSKFSNSQLIFAGPKQNGNTATVPGTLIFTSEEELAATNATDTDMWGNLPGGDQSSSNLPVVRGLRALGAVPGMVWQNRDIYYQGPIWAKIPHTDGHFHPSPLIGGFGLKHPPPQIFIKNTPVPANPATTFSSTPVNSFITQYSTGQVSVQIDWEIQKERSKRWNPEVQFTSNYGQQNSLLWAPDAAGKYTEPRAIGTRYLTHHL

SEQ ID NO: 3531 - protein, 735 aa, Artificial Sequence
  Synthetic polypeptide
MAADGYLPDWLEDNLSEGVREWWALQPGAPKPKANQQHQDNARGLVLPGYKYLGPGNGLDKGEPVNAADAAALEHDKAYDQQLKAGDNPYLKYNHADAEFQQRLQGDTSFGGNLGRAVFQAKKRVLEPLGLVEQAGETAPGKKRPLIESPQQPDSSTGIGKKGKQPAKKKLVFEDETGAGDGPPEGSTSGAMSDDSEMRAAAGGAAVEGGQGADGVGNASGDWHCDSTWSEGHVTTTSTRTWVLPTYNNHLYKRLGESLQSNTYNGFSTPWGYFDFNRFHCHFSPRDWQRLINNNWGMRPKAMRVKIFNIQVKEVTTSNGETTVANNLTSTVQIFADSSYELPYVMDAGQEGSLPPFPNDVFMVPQYGYCGLVTGNTSQQQTDRNAFYCLEYFPSQMLRTGNNFEITYSFEKVPFHSMYAHSQSLDRLMNPLIDQYLWGLQSTTTGTTLNAGTATTNFTKLRPTNFSNFKKNWLPGPSIKQQGFSKTANQNYEIPATGSDSLIEYETHSTLDGRWSALTPGPPMATAGPADSKFSNSQLIFAGPKQNGNTATVPGTLIFTSEEELAATNATDTDMWGNLPGGDQSSSNLPVVNRLSALGAVPGMVWQNRDIYYQGPIWAKIPHTDGHFHPSPLIGGFGLKHPPPQIFIKNTPVPANPATTFSSTPVNSFITQYSTGQVSVQIDWEIQKERSKRWNPEVQFTSNYGQQNSLLWAPDAAGKYTEPRAIGTRYLTHHL

SEQ ID NO: 3532 - protein, 735 aa, Artificial Sequence
  Synthetic polypeptide
MAADGYLPDWLEDNLSEGVREWWALQPGAPKPKANQQHQDNARGLVLPGYKYLGPGNGLDKGEPVNAADAAALEHDKAYDQQLKAGDNPYLKYNHADAEFQQRLQGDTSFGGNLGRAVFQAKKRVLEPLGLVEQAGETAPGKKRPLIESPQQPDSSTGIGKKGKQPAKKKLVFEDETGAGDGPPEGSTSGAMSDDSEMRAAAGGAAVEGGQGADGVGNASGDWHCDSTWSEGHVTTTSTRTWVLPTYNNHLYKRLGESLQSNTYNGFSTPWGYFDFNRFHCHFSPRDWQRLINNNWGMRPKAMRVKIFNIQVKEVTTSNGETTVANNLTSTVQIFADSSYELPYVMDAGQEGSLPPFPNDVFMVPQYGYCGLVTGNTSQQQTDRNAFYCLEYFPSQMLRTGNNFEITYSFEKVPFHSMYAHSQSLDRLMNPLIDQYLWGLQSTTTGTTLNAGTATTNFTKLRPTNFSNFKKNWLPGPSIKQQGFSKTANQNYEIPATGSDSLIEYETHSTLDGRWSALTPGPPMATAGPADSKFSNSQLIFAGPKQNGNTATVPGTLIFTSEEELAATNATDTDMWGNLPGGDQSSSNLPPVMGLGALGAVPGMVWQNRDIYYQGPIWAKIPHTDGHFHPSPLIGGFGLKHPPPQIFIKNTPVPANPATTFSSTPVNSFITQYSTGQVSVQIDWEIQKERSKRWNPEVQFTSNYGQQNSLLWAPDAAGKYTEPRAIGTRYLTHHL

SEQ ID NO: 3533 - protein, 736 aa, Artificial Sequence
  Synthetic polypeptide
MAADGYLPDWLEDNLSEGVREWWALQPGAPKPKANQQHQDNARGLVLPGYKYLGPGNGLDKGEPVNAADAAALEHDKAYDQQLKAGDNPYLKYNHADAEFQQRLQGDTSFGGNLGRAVFQAKKRVLEPLGLVEQAGETAPGKKRPLIESPQQPDSSTGIGKKGKQPAKKKLVFEDETGAGDGPPEGSTSGAMSDDSEMRAAAGGAAVEGGQGADGVGNASGDWHCDSTWSEGHVTTTSTRTWVLPTYNNHLYKRLGESLQSNTYNGFSTPWGYFDFNRFHCHFSPRDWQRLINNNWGMRPKAMRVKIFNIQVKEVTTSNGETTVANNLTSTVQIFADSSYELPYVMDAGQEGSLPPFPNDVFMVPQYGYCGLVTGNTSQQQTDRNAFYCLEYFPSQMLRTGNNFEITYSFEKVPFHSMYAHSQSLDRLMNPLIDQYLWGLQSTTTGTTLNAGTATTNFTKLRPTNFSNFKKNWLPGPSIKQQGFSKTANQNYEIPATGSDSLIEYETHSTLDGRWSALTPGPPMATAGPADSKFSNSQLIFAGPKQNGNTATVPGTLIFTSEEELAATNATDTDMWGNLPGGDQSRVDRLPTVDRLTALGAVPGMVWQNRDIYYQGPIWAKIPHTDGHFHPSPLIGGFGLKHPPPQIFIKNTPVPANPATTFSSTPVNSFITQYSTGQVSVQIDWEIQKERSKRWNPEVQFTSNYGQQNSLLWAPDAAGKYTEPRAIGTRYLTHHL

SEQ ID NO: 3534 - protein, 736 aa, Artificial Sequence
  Synthetic polypeptide
MAADGYLPDWLEDNLSEGVREWWALQPGAPKPKANQQHQDNARGLVLPGYKYLGPGNGLDKGEPVNAADAAALEHDKAYDQQLKAGDNPYLKYNHADAEFQQRLQGDTSFGGNLGRAVFQAKKRVLEPLGLVEQAGETAPGKKRPLIESPQQPDSSTGIGKKGKQPAKKKLVFEDETGAGDGPPEGSTSGAMSDDSEMRAAAGGAAVEGGQGADGVGNASGDWHCDSTWSEGHVTTTSTRTWVLPTYNNHLYKRLGESLQSNTYNGFSTPWGYFDFNRFHCHFSPRDWQRLINNNWGMRPKAMRVKIFNIQVKEVTTSNGETTVANNLTSTVQIFADSSYELPYVMDAGQEGSLPPFPNDVFMVPQYGYCGLVTGNTSQQQTDRNAFYCLEYFPSQMLRTGNNFEITYSFEKVPFHSMYAHSQSLDRLMNPLIDQYLWGLQSTTTGTTLNAGTATTNFTKLRPTNFSNFKKNWLPGPSIKQQGFSKTANQNYEIPATGSDSLIEYETHSTLDGRWSALTPGPPMATAGPADSKFSNSQLIFAGPKQNGNTATVPGTLIFTSEEELAATNATDTDMWGNLPGGDQSRALRLPTVDRLTALGAVPGMVWQNRDIYYQGPIWAKIPHTDGHFHPSPLIGGFGLKHPPPQIFIKNTPVPANPATTFSSTPVNSFITQYSTGQVSVQIDWEIQKERSKRWNPEVQFTSNYGQQNSLLWAPDAAGKYTEPRAIGTRYLTHHL

SEQ ID NO: 3535 - DNA, 1172 bp, Artificial Sequence
  Synthetic polynucleotide
cttaattaggctgcgcgctcgctcgctcactgaggccgcccgggcaaagcccgggcgtcgggcgacctttggtcgcccggcctcagtgagcgagcgagcgcgcagagagggagtggccaactccatcactaggggttccttgtagttaatgattaacccgccatgctacttatctaccagggtaatggggatcctctagaactatagctagtcgacattgattattgactagttattaatagtaatcaattacggggtcattagttcatagcccatatatggagttccgcgttacataacttacggtaaatggcccgcctggctgaccgcccaacgacccccgcccattgacgtcaataatgacgtatgttcccatagtaacgccaatagggactttccattgacgtcaatgggtggactatttacggtaaactgcccacttggcagtacatcaagtgtatcatatgccaagtacgccccctattgacgtcaatgacggtaaatggcccgcctggcattatgcccagtacatgaccttatgggactttcctacttggcagtacatctacgtattagtcatcgctattaccatgtcgaggccacgttctgcttcactctccccatctcccccccctccccacccccaattttgtatttatttattttttaattattttgtgcagcgatgggggcggggggggggggcgcgcgccaggcggggcggggcggggcgaggggcggggcggggcgaggcggagaggtgcggcggcagccaatcagagcggcgcgctccgaaagtttccttttatggcgaggcggcggcggcggcggccctataaaaagcgaagcgcgcggcgggcgggagcaagctttattgcggtagtttatcacagttaaattgctaacgcagtcagtgcttctgacacaacagtctcgaacttaagctgcagaagttggtcgtgaggcactgggcaggtaagtatcaaggttacaagacaggtttaaggagaccaatagaaactgggcttgtcgagacagagaagactcttgcgtttctgataggcacctattggtcttactgacatccactttgcctttctctccacaggtgtccactcccagttcaattacagctcttaaggctagagtacttaatacgactcsactatagg

SEQ ID NO: 3536 - DNA, 3231 bp, Artificial Sequence
  Synthetic polynucleotide
taagaattcacgcgtggtacctctagagtcgacccgggcggcctcgaggacggggtgaactacgcctgaggatccgatctttttccctctgccaaaaattatggggacatcatgaagccccttgagcatctgacttctggctaataaaggaaatttattttcattgcaatagtgtgttggaattttttgtgtctctcactcggaagcaattcgttgatctgaatttcgaccacccataatacccattaccctggtagataagtagcatggcgggttaatcattaactacaaggaacccctagtgatggagttggccactccctctctgcgcgctcgctcgctcactgaggccgggcgaccaaaggtcgcccgacgcccgggctttgcccgggcggcctcagtgagcgagcgagcgcgcagccttaattaacctaattcactggccgtcgttttacaacgtcgtgactgggaaaaccctggcgttacccaacttaatcgccttgcagcacatccccctttcgccagctggcgtaatagcgaagaggcccgcaccgatcgcccttcccaacagttgcgcagcctgaatggcgaatgggacgcgccctgtagcggcgcattaagcgcggcgggtgtggtggttacgcgcagcgtgaccgctacacttgccagcgccctagcgcccgctcctttcgctttcttcccttcctttctcgccacgttcgccggctttccccgtcaagctctaaatcgggggctccctttagggttccgatttagtgctttacggcacctcgaccccaaaaaacttgattagggtgatggttcacgtagtgggccatcgccctgatagacggtttttcgccctttgacgttggagtccacgttctttaatagtggactcttgttccaaactggaacaacactcaaccctatctcggtctattcttttgatttataagggattttgccgatttcggcctattggttaaaaaatgagctgatttaacaaaaatttaacgcgaattttaacaaaatattaacgcttacaatttaggtggcacttttcggggaaatgtgcgcggaacccctatttgtttatttttctaaatacattcaaatatgtatccgctcatgagacaataaccctgataaatgcttcaataatattgaaaaaggaagagtatgagtattcaacatttccgtgtcgcccttattcccttttttgcggcattttgccttcctgtttttgctcacccagaaacgctggtgaaagtaaaagatgctgaagatcagttgggtgcacgagtgggttacatcgaactggatctcaacagcggtaagatccttgagagttttcgccccgaagaacgttttccaatgatgagcacttttaaagttctgctatgtggcgcggtattatcccgtattgacgccgggcaagagcaactcggtcgccgcatacactattctcagaatgacttggttgagtactcaccagtcacagaaaagcatcttacggatggcatgacagtaagagaattatgcagtgctgccataaccatgagtgataacactgcggccaacttacttctgacaacgatcggaggaccgaaggagctaaccgcttttttgcacaacatgggggatcatgtaactcgccttgatcgttgggaaccggagctgaatgaagccataccaaacgacgagcgtgacaccacgatgcctgtagcaatggcaacaacgttgcgcaaactattaactggcgaactacttactctagcttcccggcaacaattaatagactggatggaggcggataaagttgcaggaccacttctgcgctcggcccttccggctggctggtttattgctgataaatctggagccggtgagcgtgggtctcgcggtatcattgcagcactggggccagatggtaagccctcccgtatcgtagttatctacacgacggggagtcaggcaactatggatgaacgaaatagacagatcgctgagataggtgcctcactgattaagcattggtaactgtcagaccaagtttactcatatatactttagattgatttaaaacttcatttttaatttaaaaggatctaggtgaagatcctttttgataatctcatgaccaaaatcccttaacgtgagttttcgttccactgagcgtcagaccccgtagaaaagatcaaaggatcttcttgagatcctttttttctgcgcgtaatctgctgcttgcaaacaaaaaaaccaccgctaccagcggtggtttgtttgccggatcaagagctaccaactctttttccgaaggtaactggcttcagcagagcgcagataccaaatactgttcttctagtgtagccgtagttaggccaccacttcaagaactctgtagcaccgcctacatacctcgctctgctaatcctgttaccagtggctgctgccagtggcgataagtcgtgtcttaccgggttggactcaagacgatagttaccggataaggcgcagcggtcgggctgaacggggggttcgtgcacacagcccagcttggagcgaacgacctacaccgaactgagatacctacagcgtgagctatgagaaagcgccacgcttcccgaagggagaaaggcggacaggtatccggtaagcggcagggtcggaacaggagagcgcacgagggagcttccagggggaaacgcctggtatctttatagtcctgtcgggtttcgccacctctgacttgagcgtcgatttttgtgatgctcgtcaggggggcggagcctatggaaaaacgccagcaacgcggcctttttacggttcctggccttttgctggccttttgctcacatgttctttcctgcgttatcccctgattctgtggataaccgtattaccgcctttgagtgagctgataccgctcgccgcagccgaacgaccgagcgcagcgagtcagtgagcgaggaagcggaagagcgcccaatacgcaaaccgcctctccccgcgcgttggccgattcattaatgcagctggcacgacaggtttcccgactggaaagcgggcagtgagcgcaacgcaattaatgtgagttagctcactcattaggcaccccaggctttacactttatgcttccggctcgtatgttgtgtggaattgtgagcggataacaatttcacacaggaaacagctatgaccatgattacgccagatttaattaaggc

SEQ ID NO: 3537 - protein, 737 aa, Artificial Sequence
  Synthetic polypeptide
  MOD_RES (264)..(264): Any naturally occurring amino acid
  MOD_RES (266)..(266): Any naturally occurring amino acid
  MOD_RES (268)..(268): Any naturally occurring amino acid
  MOD_RES (448)..(448): Any naturally occurring amino acid
  MOD_RES (459)..(460): Any naturally occurring amino acid
  MOD_RES (467)..(467): Any naturally occurring amino acid
  MOD_RES (470)..(471): Any naturally occurring amino acid
  MOD_RES (474)..(474): Any naturally occurring amino acid
  MOD_RES (495)..(495): Any naturally occurring amino acid
  MOD_RES (516)..(516): Any naturally occurring amino acid
  MOD_RES (533)..(533): Any naturally occurring amino acid
  MOD_RES (547)..(547): Any naturally occurring amino acid
  MOD_RES (551)..(551): Any naturally occurring amino acid
  MOD_RES (555)..(555): Any naturally occurring amino acid
  MOD_RES (557)..(557): Any naturally occurring amino acid
  MOD_RES (561)..(561): Any naturally occurring amino acid
  MOD_RES (563)..(563): Any naturally occurring amino acid
  MOD_RES (577)..(577): Any naturally occurring amino acid
  MOD_RES (583)..(583): Any naturally occurring amino acid
  MOD_RES (593)..(593): Any naturally occurring amino acid
  MOD_RES (596)..(596): Any naturally occurring amino acid
  MOD_RES (661)..(662): Any naturally occurring amino acid
  MOD_RES (664)..(665): Any naturally occurring amino acid
  MOD_RES (710)..(710): Any naturally occurring amino acid
  MOD_RES (717)..(719): Any naturally occurring amino acid
  MOD_RES (723)..(723): Any naturally occurring amino acid
MAADGYLPDWLEDNLSEGIREWWDLKPGAPKPKANQQKQDDGRGLVLPGYKYLGPFNGLDKGEPVNAADAAALEHDKAYDQQLKAGDNPYLRYNHADAEFQERLQEDTSFGGNLGRAVFQAKKRVLEPLGLVEEGAKTAPGKKRPVEPSPQRSPDSSTGIGKKGQQPAKKRLNFGQTGDSESVPDPQPLGEPPAGPSGLGSGTMAAGGGAPMADNNEGADGVGNASGNWHCDSTWLGDRVITTSTRTWALPTYNNHLYKQISSXSXGXTNDNHYFGYSTPWGYFDFNRFHCHFSPRDWQRLINNNWGFRPKRLNFKLFNIQVKEVTTNDGVTTIANNLTSTVQVFSDSEYQLPYVLGSAHQGCLPPFPADVFMIPQYGYLTLNNGSQAVGRSSFYCLEYFPSQMLRTGNNFTFSYTFEDVPFHSSYAHSQSLDRLMNPLIDQYLYYLXRTQSTGGTAGXXELLFSQXGPXXMSXQAKNWLPGPCYRQQRVSKTLXQNNNSNFAWTGATKYHLNGRXSLVNPGVAMATHKDDEXRFFPSSGVLIFGKXGAGXNNTXLXNVMXTXEEEIKTTNPVATEXYGVVAXNLQSSNTAPXTGXVNSQGALPGMVWQNRDVYLQGPIWAKIPHTDGNFHPSPLMGGFGLKHPPPQILIKNTPVPANPPXXFXXAKFASFITQYSTGQVSVEIEWELQKENSKRWNPEIQYTSNYAKSXNVDFAVXXXGVYXEPRPIGTRYLTRNL

SEQ ID NO: 3538 - protein, 737 aa, Artificial Sequence
  Synthetic polypeptide
MAADGYLPDWLEDNLSEGIREWWDLKPGAPKPKANQQKQDDGRGLVLPGYKYLGPFNGLDKGEPVNAADAAALEHDKAYDQQLKAGDNPYLRYNHADAEFQERLQEDTSFGGNLGRAVFQAKKRVLEPLGLVEEGAKTAPGKKRPVEPSPQRSPDSSTGIGKKGQQPAKKRLNFGQTGDSESVPDPQPLGEPPAGPSGLGSGTMAAGGGAPMADNNEGADGVGNASGNWHCDSTWLGDRVITTSTRTWALPTYNNHLYKQISSASSGSTNDNHYFGYSTPWGYFDFNRFHCHFSPRDWQRLINNNWGFRPKRLNFKLFNIQVKEVTTNDGVTTIANNLTSTVQVFSDSEYQLPYVLGSAHQGCLPPFPADVFMIPQYGYLTLNNGSQAVGRSSFYCLEYFPSQMLRTGNNFTFSYTFEDVPFHSSYAHSQSLDRLMNPLIDQYLYYLARTQSTGGTAGNRELLFSQGGPSNMSAQAKNWLPGPCYRQQRVSKTLAQNNNSNFAWTGATKYHLNGRDSLVNPGVAMATHKDDEDRFFPSSGVLIFGKEGAGANNTALENVMLTNEEEIKTTNPVATEQYGVVASNLQSSNTAPATGAVNSQGALPGMVWQNRDVYLQGPIWAKIPHTDGNFHPSPLMGGFGLKHPPPQILIKNTPVPANPPATFTPAKFASFITQYSTGQVSVEIEWELQKENSKRWNPEIQYTSNYAKSTNVDFAVNNEGVYSEPRPIGTRYLTRNL

SEQ ID NO: 3539 - protein, 737 aa, Artificial Sequence
  Synthetic polypeptide
MAADGYLPDWLEDNLSEGIREWWDLKPGAPKPKANQQKQDDGRGLVLPGYKYLGPFNGLDKGEPVNAADAAALEHDKAYDQQLKAGDNPYLRYNHADAEFQERLQEDTSFGGNLGRAVFQAKKRVLEPLGLVEEGAKTAPGKKRPVEPSPQRSPDSSTGIGKKGQQPAKKRLNFGQTGDSESVPDPQPLGEPPAGPSGLGSGTMAAGGGAPMADNNEGADGVGNASGNWHCDSTWLGDRVITTSTRTWALPTYNNHLYKQISSQSSGSTNDNHYFGYSTPWGYFDFNRFHCHFSPRDWQRLINNNWGFRPKRLNFKLFNIQVKEVTTNDGVTTIANNLTSTVQVFSDSEYQLPYVLGSAHQGCLPPFPADVFMIPQYGYLTLNNGSQAVGRSSFYCLEYFPSQMLRTGNNFTFSYTFEDVPFHSSYAHSQSLDRLMNPLIDQYLYYLSRTQSTGGTAGNRELLFSQGGPANMSAQAKNWLPGPCYRQQRVSKTLSQNNNSNFAWTGATKYHLNGRDSLVNPGVAMATHKDDEERFFPSSGVLIFGKQGAGANNTTLDNVMMTSEEEIKTTNPVATEQYGVVASNLQSSNTAPQTGTVNSQGALPGMVWQNRDVYLQGPIWAKIPHTDGNFHPSPLMGGFGLKHPPPQILIKNTPVPANPPAVFSPAKFASFITQYSTGQVSVEIEWELQKENSKRWNPEIQYTSNYAKSTNVDFAVNSEGVYSEPRPIGTRYLTRNL

SEQ ID NO: 3540 - protein, 737 aa, Artificial Sequence
  Synthetic polypeptide
MAADGYLPDWLEDNLSEGIREWWDLKPGAPKPKANQQKQDDGRGLVLPGYKYLGPFNGLDKGEPVNAADAAALEHDKAYDQQLKAGDNPYLRYNHADAEFQERLQEDTSFGGNLGRAVFQAKKRVLEPLGLVEEGAKTAPGKKRPVEPSPQRSPDSSTGIGKKGQQPAKKRLNFGQTGDSESVPDPQPLGEPPAGPSGLGSGTMAAGGGAPMADNNEGADGVGNASGNWHCDSTWLGDRVITTSTRTWALPTYNNHLYKQISSASSGSTNDNHYFGYSTPWGYFDFNRFHCHFSPRDWQRLINNNWGFRPKRLNFKLFNIQVKEVTTNDGVTTIANNLTSTVQVFSDSEYQLPYVLGSAHQGCLPPFPADVFMIPQYGYLTLNNGSQAVGRSSFYCLEYFPSQMLRTGNNFTFSYTFEDVPFHSSYAHSQSLDRLMNPLIDQYLYYLARTQSTGGTAGTRELLFSQGGPSNMSAQAKNWLPGPCYRQQRVSKTLTQNNNSNFAWTGATKYHLNGRDSLVNPGVAMATHKDDEDRFFPSSGVLIFGKQGAGANNTALDNVMITNEEEIKTTNPVATEQYGVVASNLQSSNTAPATGTVNSQGALPGMVWQNRDVYLQGPIWAKIPHTDGNFHPSPLMGGFGLKHPPPQILIKNTPVPANPPTVFSPAKFASFITQYSTGQVSVEIEWELQKENSKRWNPEIQYTSNYAKSTNVDFAVNSEGVYTEPRPIGTRYLTRNL

SEQ ID NO: 3541 - protein, 737 aa, Artificial Sequence
  Synthetic polypeptide
  MOD_RES (264)..(264): Any naturally occurring amino acid
  MOD_RES (448)..(448): Any naturally occurring amino acid
  MOD_RES (459)..(459): Any naturally occurring amino acid
  MOD_RES (470)..(470): Any naturally occurring amino acid
  MOD_RES (495)..(495): Any naturally occurring amino acid
  MOD_RES (533)..(533): Any naturally occurring amino acid
  MOD_RES (547)..(547): Any naturally occurring amino acid
  MOD_RES (555)..(555): Any naturally occurring amino acid
  MOD_RES (557)..(557): Any naturally occurring amino acid
  MOD_RES (561)..(561): Any naturally occurring amino acid
  MOD_RES (563)..(563): Any naturally occurring amino acid
  MOD_RES (593)..(593): Any naturally occurring amino acid
  MOD_RES (596)..(596): Any naturally occurring amino acid
  MOD_RES (661)..(662): Any naturally occurring amino acid
  MOD_RES (664)..(664): Any naturally occurring amino acid
  MOD_RES (718)..(718): Any naturally occurring amino acid
  MOD_RES (723)..(723): Any naturally occurring amino acid
MAADGYLPDWLEDNLSEGIREWWDLKPGAPKPKANQQKQDDGRGLVLPGYKYLGPFNGLDKGEPVNAADAAALEHDKAYDQQLKAGDNPYLRYNHADAEFQERLQEDTSFGGNLGRAVFQAKKRVLEPLGLVEEGAKTAPGKKRPVEPSPQRSPDSSTGIGKKGQQPAKKRLNFGQTGDSESVPDPQPLGEPPAGPSGLGSGTMAAGGGAPMADNNEGADGVGNASGNWHCDSTWLGDRVITTSTRTWALPTYNNHLYKQISSXSSGSTNDNHYFGYSTPWGYFDFNRFHCHFSPRDWQRLINNNWGFRPKRLNFKLFNIQVKEVTTNDGVTTIANNLTSTVQVFSDSEYQLPYVLGSAHQGCLPPFPADVFMIPQYGYLTLNNGSQAVGRSSFYCLEYFPSQMLRTGNNFTFSYTFEDVPFHSSYAHSQSLDRLMNPLIDQYLYYLXRTQSTGGTAGXRELLFSQGGPXNMSAQAKNWLPGPCYRQQRVSKTLXQNNNSNFAWTGATKYHLNGRDSLVNPGVAMATHKDDEXRFFPSSGVLIFGKXGAGANNTXLXNVMXTXEEEIKTTNPVATEQYGVVASNLQSSNTAPXTGXVNSQGALPGMVWQNRDVYLQGPIWAKIPHTDGNFHPSPLMGGFGLKHPPPQILIKNTPVPANPPXXFXPAKFASFITQYSTGQVSVEIEWELQKENSKRWNPEIQYTSNYAKSTNVDFAVNXEGVYXEPRPIGTRYLTRNL

SEQ ID NO: 3542 - protein, 737 aa, Artificial Sequence
  Synthetic polypeptide
  MOD_RES (264)..(264): Any naturally occurring amino acid
  MOD_RES (448)..(448): Any naturally occurring amino acid
  MOD_RES (470)..(470): Any naturally occurring amino acid
  MOD_RES (533)..(533): Any naturally occurring amino acid
  MOD_RES (547)..(547): Any naturally occurring amino acid
  MOD_RES (555)..(555): Any naturally occurring amino acid
  MOD_RES (557)..(557): Any naturally occurring amino acid
  MOD_RES (561)..(561): Any naturally occurring amino acid
  MOD_RES (563)..(563): Any naturally occurring amino acid
  MOD_RES (593)..(593): Any naturally occurring amino acid
  MOD_RES (596)..(596): Any naturally occurring amino acid
  MOD_RES (662)..(662): Any naturally occurring amino acid
  MOD_RES (664)..(664): Any naturally occurring amino acid
  MOD_RES (718)..(718): Any naturally occurring amino acid
MAADGYLPDWLEDNLSEGIREWWDLKPGAPKPKANQQKQDDGRGLVLPGYKYLGPFNGLDKGEPVNAADAAALEHDKAYDQQLKAGDNPYLRYNHADAEFQERLQEDTSFGGNLGRAVFQAKKRVLEPLGLVEEGAKTAPGKKRPVEPSPQRSPDSSTGIGKKGQQPAKKRLNFGQTGDSESVPDPQPLGEPPAGPSGLGSGTMAAGGGAPMADNNEGADGVGNASGNWHCDSTWLGDRVITTSTRTWALPTYNNHLYKQISSXSSGSTNDNHYFGYSTPWGYFDFNRFHCHFSPRDWQRLINNNWGFRPKRLNFKLFNIQVKEVTTNDGVTTIANNLTSTVQVFSDSEYQLPYVLGSAHQGCLPPFPADVFMIPQYGYLTLNNGSQAVGRSSFYCLEYFPSQMLRTGNNFTFSYTFEDVPFHSSYAHSQSLDRLMNPLIDQYLYYLXRTQSTGGTAGNRELLFSQGGPXNMSAQAKNWLPGPCYRQQRVSKTLSQNNNSNFAWTGATKYHLNGRDSLVNPGVAMATHKDDEXRFFPSSGVLIFGKXGAGANNTXLXNVMXTXEEEIKTTNPVATEQYGVVASNLQSSNTAPXTGXVNSQGALPGMVWQNRDVYLQGPIWAKIPHTDGNFHPSPLMGGFGLKHPPPQILIKNTPVPANPPAXFXPAKFASFITQYSTGQVSVEIEWELQKENSKRWNPEIQYTSNYAKSTNVDFAVNXEGVYSEPRPIGTRYLTRNL

SEQ ID NO: 3543 - DNA, 2217 bp, Artificial Sequence
  Synthetic polynucleotide
atggctgccgatggttatcttccagattggctcgaggacactctctctgaaggaataagacagtggtggaagctcaaacctggcccaccaccaccaaagcccgcagagcggcataaggacgacagcaggggtcttgtgcttcctgggtacaagtacctcggacccttcaacggactcgacaagggagagccggtcaacgaggcagacgccgcggccctcgagcacgacaaagcctacgaccggcagctcgacagcggagacaacccgtacctcaagtacaaccacgccgacgcggagtttcaggagcgccttaaagaagatacgtcttttgggggcaacctcggacgagcagtcttccaggcgaaaaagagggttcttgaacctctgggcctggttgaggaacctgttaagacggctccgggaaagaagagaccggtagagccatcaccccagcgttctccagactcctctacgggcatcggcaagaaaggccaacagcccgccagaaaaagactcaattttggtcagactggcgactcagagtcagttccagaccctcaacctctcggagaacctccagcagcgccctctggtgtgggacctaatacaatggctgcaggcggtggcgcaccaatggcagacaataacgaaggcgccgacggagtgggtagttcctcgggaaattggcattgcgattccacatggctgggcgacagagtcatcaccaccagcacccgaacctgggccctgcccacctacaacaaccacctctacaagcaaatctccaacgggacatcgggaggagccaccaacgacaacacctacttcggctacagcaccccctgggggtattttgactttaacagattccactgccacttttcaccacgtgactggcagcgactcatcaacaacaactggggattccggcccaagagactcagcttcaagctcttcaacatccaggtcaaggaggtcacgcagaatgaaggcaccaagaccatcgccaataacctcaccagcaccatccaggtgtttacggactcggagtaccagctgccgtacgttctcggctctgcccaccagggctgcctgcctccgttcccggcggacgtgttcatgattccccagtacggctacctaacactcaacaacggtagtcaggccgtgggacgctcctccttctactgcctggaatactttccttcgcagatgctgagaaccggcaacaacttccagtttacttacaccttcgaggacgtgcctttccacagcagctacgcccacagccagagcttggaccggctgatgaatcctctgattgaccagtacctgtactacttgtctcggactcaaacaacaggaggcacggcaaatacgcagactctgggcttcagccaaggtgggcctaatacaatggccaatcaggcaaagaactggctgccaggaccctgttaccgccaacaacgcgtctcaacgacaaccgggcaaaacaacaatagcaactttgcctggactgctgggaccaaataccatctgaatggaagaaattcattggctaatcctggcatcgctatggcaacacacaaagacgacgaggagcgtttttttcccagtaacgggatcctgatttttggcaaacaaaatgctgccagagacaatgcggattacagcgatgtcatgctcaccagcgaggaagaaatcaaaaccactaaccctgtggctacagaggaatacggtatcgtggcagataacttgcagcagcaaaacacggctcctcaaattggaactgtcaacagccagggggccttacccggtatggtctggcagaaccgggacgtgtacctgcagggtcccatctgggccaagattcctcacacggacggcaacttccacccgtctccgctgatgggcggctttggcctgaaacatcctccgcctcagatcctgatcaagaacacgcctgtacctgcggatcctccgaccaccttcaaccagtcaaagctgaactctttcatcacgcaatacagcaccggacaggtcagcgtggaaattgaatgggagctgcagaaggaaaacagcaagcgctggaaccccgagatccagtacacctccaactactacaaatctacaagtgtggactttgctgttaatacagaaggcgtgtactctgaaccccgccccattggcacccgttacctcacccgtaatctgtaa

SEQ ID NO: 3544 - protein, 733 aa, Artificial Sequence; identical to SEQ ID NO: 3329
  Synthetic polypeptide

SEQ ID NO: 3545 - DNA, 2203 bp, Artificial Sequence
  Synthetic polynucleotide
atgtcttttgttgatcaccctccagattggttggaagaagttggtgaaggtcttcgcgagtttttgggccttgaagcgggcccaccgaaaccaaaacccaatcagcagcatcaagatcaagcccgtggtcttgtgctgcctggttataactatctcggacccggaaacggtctcgatcgaggagagcctgtcaacagggcagacgaggtcgcgcgagagcacgacatctcgtacaacgagcagcttgaggcgggagacaacccctacctcaagtacaaccacgcggacgccgagtttcaggagaagctcgccgacgacacatccttcgggggaaacctcggaaaggcagtctttcaggccaagaaaagggttctcgaaccttttggcctggttgaagagggtgctaagacggcccctaccggaaagcggatagacgaccactttccaaaaagaaagaaggctcggaccgaagaggactccaagccttccacctcgtcagacgccgaagctggacccagcggatcccagcagctgcaaatcccagcccaaccagcctcaagtttgggagctgatacaatgtctgcgggaggtggcggcccattgggcgacaataaccaaggtgccgatggagtgggcaatgcctcgggagattggcattgcgattccacgtggatgggggacagagtcgtcaccaagtccacccgaacctgggtgctgcccagctacaacaaccaccagtaccgagagatcaaaagcggctccgtcgacggaagcaacgccaacgcctactttggatacagcaccccctgggggtactttgactttaaccgcttccacagccactggagcccccgagactggcaaagactcatcaacaactactggggcttcagaccccggtccctcagagtcaaaatcttcaacattcaagtcaaagaggtcacggtgcaggactccaccaccaccatcgccaacaacctcacctccaccgtccaagtgtttacggacgacgactaccagctgccctacgtcgtcggcaacgggaccgagggatgcctgccggccttccctccgcaggtctttacgctgccgcagtacggttacgcgacgctgaaccgcgacaacacagaaaatcccaccgagaggagcagcttcttctgcctagagtactttcccagcaagatgctgagaacgggcaacaactttgagtttacctacaactttgaggaggtgcccttccactccagcttcgctcccagtcagaacctgttcaagctggccaacccgctggtggaccagtacttgtaccgcttcgtgagcacaaataacactggcggagtccagttcaacaagaacctggccgggagatacgccaacacctacaaaaactggttcccggggcccatgggccgaacccagggctggaacctgggctccggggtcaaccgcgccagtgtcagcgccttcgccacgaccaataggatggagctcgagggcgcgagttaccaggtgcccccgcagccgaacggcatgaccaacaacctccagggcagcaacacctatgccctggagaacactatgatcttcaacagccagccggcgaacccgggcaccaccgccacgtacctcgagggcaacatgctcatcaccagcgagagcgagacgcagccggtgaaccgcgtggcgtacaacgtcggcgggcaggtggccaccaacaaccagagctccaccactgcccccgcgaccggcacgtacaacctccaggaaatcgtgcccggcagcgtgtggatggagagggacgtgtacctccaaggacccatctgggccaagatcccagagacgggggcgcactttcacccctctccggccatgggcggattcggactcaaacacccaccgcccatgatgctcatcaagaacacgcctgtgcccggaaatatcaccagcttctcggacgtgcccgtcagcagcttcatcacccagtacagcaccgggcaggtcaccgtggagatggagtgggagctcaagaaggaaaactccaagaggtggaacccagagatccagtacacaaacaactacaacgacccccagtttgtggactttgccccggacagcaccggggaatacagaaccaccagacctatcggaacccgataccttacccgacccctttaacccattcatgtcgcataccctcaataaa

SEQ ID NO: 3546 - protein, 724 aa, Artificial Sequence
  Synthetic polypeptide
MSFVDHPPDWLEEVGEGLREFLGLEAGPPKPKPNQQHQDQARGLVLPGYNYLGPGNGLDRGEPVNRADEVAREHDISYNEQLEAGDNPYLKYNHADAEFQEKLADDTSFGGNLGKAVFQAKKRVLEPFGLVEEGAKTAPTGKRIDDHFPKRKKARTEEDSKPSTSSDAEAGPSGSQQLQIPAQPASSLGADTMSAGGGGPLGDNNQGADGVGNASGDWHCDSTWMGDRVVTKSTRTWVLPSYNNHQYREIKSGSVDGSNANAYFGYSTPWGYFDFNRFHSHWSPRDWQRLINNYWGFRPRSLRVKIFNIQVKEVTVQDSTTTIANNLTSTVQVFTDDDYQLPYVVGNGTEGCLPAFPPQVFTLPQYGYATLNRDNTENPTERSSFFCLEYFPSKMLRTGNNFEFTYNFEEVPFHSSFAPSQNLFKLANPLVDQYLYRFVSTNNTGGVQFNKNLAGRYANTYKNWFPGPMGRTQGWNLGSGVNRASVSAFATTNRMELEGASYQVPPQPNGMTNNLQGSNTYALENTMIFNSQPANPGTTATYLEGNMLITSESETQPVNRVAYNVGGQVATNNQSSTTAPATGTYNLQEIVPGSVWMERDVYLQGPIWAKIPETGAHFHPSPAMGGFGLKHPPPMMLIKNTPVPGNITSFSDVPVSSFITQYSTGQVTVEMEWELKKENSKRWNPEIQYTNNYNDPQFVDFAPDSTGEYRTTRPIGTRYLTRPL

SEQ ID NO: 3547 - DNA, 2203 bp, Artificial Sequence
  Synthetic polynucleotide
atgtcttttgttgatcaccctccagattggttggaagaagttggtgaaggtcttcgcgagtttttgggccttgaagcgggcccaccgaaaccaaaacccaatcagcagcatcaagatcaagcccgtggtcttgtgctgcctggttataactatctcggacccggaaacggtctcgatcgaggagagcctgtcaacagggcagacgaggtcgcgcgagagcacgacatctcgtacaacgagcagcttgaggcgggagacaacccctacctcaagtacaaccacgcggacgccgagtttcaggagaagctcgccgacgacacatccttcgggggaaacctcggaaaggcagtctttcaggccaagaaaagggttctcgaaccttttggcctggttgaagagggtgctaagacggcccctaccggaaagcggatagacgaccactttccaaaaagaaagaaggctcggaccgaagaggactccaagccttccacctcgtcagacgccgaagctggacccagcggatcccagcagctgcaaatcccagcccaaccagcctcaagtttgggagctgatacaatgtctgcgggaggtggcggcccattgggcgacaataaccaaggtgccgatggagtgggcaatgcctcgggagattggcattgcgattccacgtggatgggggacagagtcgtcaccaagtccacccgaacctgggtgctgcccagctacaacaaccaccagtaccgagagatcaaaagcggctccgtcgacggaagcaacgccaacgcctactttggatacagcaccccctgggggtactttgactttaaccgcttccacagccactggagcccccgagactggcaaagactcatcaacaactactggggcttcagaccccggtccctcagagtcaaaatcttcaacattcaagtcaaagaggtcacggtgcaggactccaccaccaccatcgccaacaacctcacctccaccgtccaagtgtttacggacgacgactaccagctgccctacgtcgtcggcaacgggaccgagggatgcctgccggccttccctccgcaggtctttacgctgccgcagtacggttacgcgacgctgaaccgcgacaacacagaaaatcccaccgagaggagcagcttcttctgcctagagtactttcccagcaagatgctgagaacgggcaacaactttgagtttacctacaactttgaggaggtgcccttccactccagcttcgctcccagtcagaacctgttcaagctggccaacccgctggtggaccagtacttgtaccgcttcgtgagcacaaataacactggcggagtccagttcaacaagaacctggccgggagatacgccaacacctacaaaaactggttcccggggcccatgggccgaacccagggctggaacctgggctccggggtcaaccgcgccagtgtcagcgccttcgccacgaccaataggatggagctcgagggcgcgagttaccaggtgcccccgcagccgaacggcatgaccaacaacctccagggcagcaacacctatgccctggagaacactatgatcttcaacagccagccggcgaacccgggcaccaccgccacgtacctcgagggcaacatgctcatcaccagcgagagcgagacgcagccggtgaaccgcgtggcgtacaacgtcggcgggcagatggccaccaacaaccagagctccaccactgcccccgcgaccggcacggtcaacctccaggaaatcgtgcccggcagcgtgtggatggagagggacgtgtacctccaaggacccatctgggccaagatcccagagacgggggcgcactttcacccctctccggccatgggcggattcggactcaaacacccaccgcccatgatgctcatcaagaacacgcctgtgcccggaaatatcaccagcttctcggacgtgcccgtcagcagcttcatcacccagtacagcaccgggcaggtcaccgtggagatggagtgggagctcaagaaggaaaactccaagaggtggaacccagagatccagtacacaaacaactacaacgacccccagtttgtggactttgccccggacagcaccggggaatacagaaccaccagacctatcggaacccgataccttacccgacccctttaacccattcatgtcgcataccctcaataaa

SEQ ID NO: 3548 - protein, 724 aa, Artificial Sequence
  Synthetic polypeptide
MSFVDHPPDWLEEVGEGLREFLGLEAGPPKPKPNQQHQDQARGLVLPGYNYLGPGNGLDRGEPVNRADEVAREHDISYNEQLEAGDNPYLKYNHADAEFQEKLADDTSFGGNLGKAVFQAKKRVLEPFGLVEEGAKTAPTGKRIDDHFPKRKKARTEEDSKPSTSSDAEAGPSGSQQLQIPAQPASSLGADTMSAGGGGPLGDNNQGADGVGNASGDWHCDSTWMGDRVVTKSTRTWVLPSYNNHQYREIKSGSVDGSNANAYFGYSTPWGYFDFNRFHSHWSPRDWQRLINNYWGFRPRSLRVKIFNIQVKEVTVQDSTTTIANNLTSTVQVFTDDDYQLPYVVGNGTEGCLPAFPPQVFTLPQYGYATLNRDNTENPTERSSFFCLEYFPSKMLRTGNNFEFTYNFEEVPFHSSFAPSQNLFKLANPLVDQYLYRFVSTNNTGGVQFNKNLAGRYANTYKNWFPGPMGRTQGWNLGSGVNRASVSAFATTNRMELEGASYQVPPQPNGMTNNLQGSNTYALENTMIFNSQPANPGTTATYLEGNMLITSESETQPVNRVAYNVGGQMATNNQSSTTAPATGTVNLQEIVPGSVWMERDVYLQGPIWAKIPETGAHFHPSPAMGGFGLKHPPPMMLIKNTPVPGNITSFSDVPVSSFITQYSTGQVTVEMEWELKKENSKRWNPEIQYTNNYNDPQFVDFAPDSTGEYRTTRPIGTRYLTRPL

SEQ ID NO: 3549 - DNA, 2203 bp, Artificial Sequence
  Synthetic polynucleotide
atgtcttttgttgatcaccctccagattggttggaagaagttggtgaaggtcttcgcgagtttttgggccttgaagcgggcccaccgaaaccaaaacccaatcagcagcatcaagatcaagcccgtggtcttgtgctgcctggttataactatctcggacccggaaacggtctcgatcgaggagagcctgtcaacagggcagacgaggtcgcgcgagagcacgacatctcgtacaacgagcagcttgaggcgggagacaacccctacctcaagtacaaccacgcggacgccgagtttcaggagaagctcgccgacgacacatccttcgggggaaacctcggaaaggcagtctttcaggccaagaaaagggttctcgaaccttttggcctggttgaagagggtgctaagacggcccctaccggaaagcggatagacgaccactttccaaaaagaaagaaggctcggaccgaagaggactccaagccttccacctcgtcagacgccgaagctggacccagcggatcccagcagctgcaaatcccagcccaaccagcctcaagtttgggagctgatacaatgtctgcgggaggtggcggcccattgggcgacaataaccaaggtgccgatggagtgggcaatgcctcgggagattggcattgcgattccacgtggatgggggacagagtcgtcaccaagtccacccgaacctgggtgctgcccagctacaacaaccaccagtaccgagagatcaaaagcggctccgtcgacggaagcaacgccaacgcctactttggatacagcaccccctgggggtactttgactttaaccgcttccacagccactggagcccccgagactggcaaagactcatcaacaactactggggcttcagaccccggtccctcagagtcaaaatcttcaacattcaagtcaaagaggtcacggtgcaggactccaccaccaccatcgccaacaacctcacctccaccgtccaagtgtttacggacgacgactaccagctgccctacgtcgtcggcaacgggaccgagggatgcctgccggccttccctccgcaggtctttacgctgccgcagtacggttacgcgacgctgaaccgcgacaacacagaaaatcccaccgagaggagcagcttcttctgcctagagtactttcccagcaagatgctgagaacgggcaacaactttgagtttacctacaactttgaggaggtgcccttccactccagcttcgctcccagtcagaacctgttcaagctggccaacccgctggtggaccagtacttgtaccgcttcgtgagcacaaataacactggcggagtccagttcaacaagaacctggccgggagatacgccaacacctacaaaaactggttcccggggcccatgggccgaacccagggctggaacctgggctccggggtcaaccgcgccagtgtcagcgccttcgccacgaccaataggatggagctcgagggcgcgagttaccaggtgcccccgcagccgaacggcatgaccaacaacctccagggcagcaacacctatgccctggagaacactatgatcttcaacagccagccggcgaacccgggcaccaccgccacgtacctcgagggcaacatgctcatcaccagcgagagcgagacgcagccggtgaaccgcgtggcgtacaacgtcggcgggcagatggccaccaacaaccagagctccaccactgcccccgcgaccggcacgtacaacacccaggaaatcgtgcccggcagcgtgtggatggagagggacgtgtacctccaaggacccatctgggccaagatcccagagacgggggcgcactttcacccctctccggccatgggcggattcggactcaaacacccaccgcccatgatgctcatcaagaacacgcctgtgcccggaaatatcaccagcttctcggacgtgcccgtcagcagcttcatcacccagtacagcaccgggcaggtcaccgtggagatggagtgggagctcaagaaggaaaactccaagaggtggaacccagagatccagtacacaaacaactacaacgacccccagtttgtggactttgccccggacagcaccggggaatacagaaccaccagacctatcggaacccgataccttacccgacccctttaacccattcatgtcgcataccctcaataaa

SEQ ID NO: 3550 - protein, 724 aa, Artificial Sequence
  Synthetic polypeptide
MSFVDHPPDWLEEVGEGLREFLGLEAGPPKPKPNQQHQDQARGLVLPGYNYLGPGNGLDRGEPVNRADEVAREHDISYNEQLEAGDNPYLKYNHADAEFQEKLADDTSFGGNLGKAVFQAKKRVLEPFGLVEEGAKTAPTGKRIDDHFPKRKKARTEEDSKPSTSSDAEAGPSGSQQLQIPAQPASSLGADTMSAGGGGPLGDNNQGADGVGNASGDWHCDSTWMGDRVVTKSTRTWVLPSYNNHQYREIKSGSVDGSNANAYFGYSTPWGYFDFNRFHSHWSPRDWQRLINNYWGFRPRSLRVKIFNIQVKEVTVQDSTTTIANNLTSTVQVFTDDDYQLPYVVGNGTEGCLPAFPPQVFTLPQYGYATLNRDNTENPTERSSFFCLEYFPSKMLRTGNNFEFTYNFEEVPFHSSFAPSQNLFKLANPLVDQYLYRFVSTNNTGGVQFNKNLAGRYANTYKNWFPGPMGRTQGWNLGSGVNRASVSAFATTNRMELEGASYQVPPQPNGMTNNLQGSNTYALENTMIFNSQPANPGTTATYLEGNMLITSESETQPVNRVAYNVGGQMATNNQSSTTAPATGTYNTQEIVPGSVWMERDVYLQGPIWAKIPETGAHFHPSPAMGGFGLKHPPPMMLIKNTPVPGNITSFSDVPVSSFITQYSTGQVTVEMEWELKKENSKRWNPEIQYTNNYNDPQFVDFAPDSTGEYRTTRPIGTRYLTRPL

SEQ ID NO: 3551 - DNA, 2203 bp, Artificial Sequence
  Synthetic polynucleotide
atgtcttttgttgatcaccctccagattggttggaagaagttggtgaaggtcttcgcgagtttttgggccttgaagcgggcccaccgaaaccaaaacccaatcagcagcatcaagatcaagcccgtggtcttgtgctgcctggttataactatctcggacccggaaacggtctcgatcgaggagagcctgtcaacagggcagacgaggtcgcgcgagagcacgacatctcgtacaacgagcagcttgaggcgggagacaacccctacctcaagtacaaccacgcggacgccgagtttcaggagaagctcgccgacgacacatccttcgggggaaacctcggaaaggcagtctttcaggccaagaaaagggttctcgaaccttttggcctggttgaagagggtgctaagacggcccctaccggaaagcggatagacgaccactttccaaaaagaaagaaggctcggaccgaagaggactccaagccttccacctcgtcagacgccgaagctggacccagcggatcccagcagctgcaaatcccagcccaaccagcctcaagtttgggagctgatacaatgtctgcgggaggtggcggcccattgggcgacaataaccaaggtgccgatggagtgggcaatgcctcgggagattggcattgcgattccacgtggatgggggacagagtcgtcaccaagtccacccgaacctgggtgctgcccagctacaacaaccaccagtaccgagagatcaaaagcggctccgtcgacggaagcaacgccaacgcctactttggatacagcaccccctgggggtactttgactttaaccgcttccacagccactggagcccccgagactggcaaagactcatcaacaactactggggcttcagaccccggtccctcagagtcaaaatcttcaacattcaagtcaaagaggtcacggtgcaggactccaccaccaccatcgccaacaacctcacctccaccgtccaagtgtttacggacgacgactaccagctgccctacgtcgtcggcaacgggaccgagggatgcctgccggccttccctccgcaggtctttacgctgccgcagtacggttacgcgacgctgaaccgcgacaacacagaaaatcccaccgagaggagcagcttcttctgcctagagtactttcccagcaagatgctgagaacgggcaacaactttgagtttacctacaactttgaggaggtgcccttccactccagcttcgctcccagtcagaacctgttcaagctggccaacccgctggtggaccagtacttgtaccgcttcgtgagcacaaataacactggcggagtccagttcaacaagaacctggccgggagatacgccaacacctacaaaaactggttcccggggcccatgggccgaacccagggctggaacctgggctccggggtcaaccgcgccagtgtcagcgccttcgccacgaccaataggatggagctcgagggcgcgagttaccaggtgcccccgcagccgaacggcatgaccaacaacctccagggcagcaacacctatgccctggagaacactatgatcttcaacagccagccggcgaacccgggcaccaccgccacgtacctcgagggcaacatgctcatcaccagcgagagcgagacgcagccggtgaaccgcgtggcgtacaacgtcggcgggcagatggccaccaacaaccagagctccaccactgcccccgcgaccggcacggtcaacacccaggaaatcgtgcccggcagcgtgtggatggagagggacgtgtacctccaaggacccatctgggccaagatcccagagacgggggcgcactttcacccctctccggccatgggcggattcggactcaaacacccaccgcccatgatgctcatcaagaacacgcctgtgcccggaaatatcaccagcttctcggacgtgcccgtcagcagcttcatcacccagtacagcaccgggcaggtcaccgtggagatggagtgggagctcaagaaggaaaactccaagaggtggaacccagagatccagtacacaaacaactacaacgacccccagtttgtggactttgccccggacagcaccggggaatacagaaccaccagacctatcggaacccgataccttacccgacccctttaacccattcatgtcgcataccctcaataaa

SEQ ID NO: 3552 - protein, 724 aa, Artificial Sequence
  Synthetic polypeptide
MSFVDHPPDWLEEVGEGLREFLGLEAGPPKPKPNQQHQDQARGLVLPGYNYLGPGNGLDRGEPVNRADEVAREHDISYNEQLEAGDNPYLKYNHADAEFQEKLADDTSFGGNLGKAVFQAKKRVLEPFGLVEEGAKTAPTGKRIDDHFPKRKKARTEEDSKPSTSSDAEAGPSGSQQLQIPAQPASSLGADTMSAGGGGPLGDNNQGADGVGNASGDWHCDSTWMGDRVVTKSTRTWVLPSYNNHQYREIKSGSVDGSNANAYFGYSTPWGYFDFNRFHSHWSPRDWQRLINNYWGFRPRSLRVKIFNIQVKEVTVQDSTTTIANNLTSTVQVFTDDDYQLPYVVGNGTEGCLPAFPPQVFTLPQYGYATLNRDNTENPTERSSFFCLEYFPSKMLRTGNNFEFTYNFEEVPFHSSFAPSQNLFKLANPLVDQYLYRFVSTNNTGGVQFNKNLAGRYANTYKNWFPGPMGRTQGWNLGSGVNRASVSAFATTNRMELEGASYQVPPQPNGMTNNLQGSNTYALENTMIFNSQPANPGTTATYLEGNMLITSESETQPVNRVAYNVGGQMATNNQSSTTAPATGTVNTQEIVPGSVWMERDVYLQGPIWAKIPETGAHFHPSPAMGGFGLKHPPPMMLIKNTPVPGNITSFSDVPVSSFITQYSTGQVTVEMEWELKKENSKRWNPEIQYTNNYNDPQFVDFAPDSTGEYRTTRPIGTRYLTRPL

SEQ ID NO: 3553 - DNA, 2203 bp, Artificial Sequence
  Synthetic polynucleotide
atgtcttttgttgatcaccctccagattggttggaagaagttggtgaaggtcttcgcgagtttttgggccttgaagcgggcccaccgaaaccaaaacccaatcagcagcatcaagatcaagcccgtggtcttgtgctgcctggttataactatctcggacccggaaacggtctcgatcgaggagagcctgtcaacagggcagacgaggtcgcgcgagagcacgacatctcgtacaacgagcagcttgaggcgggagacaacccctacctcaagtacaaccacgcggacgccgagtttcaggagaagctcgccgacgacacatccttcgggggaaacctcggaaaggcagtctttcaggccaagaaaagggttctcgaaccttttggcctggttgaagagggtgctaagacggcccctaccggaaagcggatagacgaccactttccaaaaagaaagaaggctcggaccgaagaggactccaagccttccacctcgtcagacgccgaagctggacccagcggatcccagcagctgcaaatcccagcccaaccagcctcaagtttgggagctgatacaatgtctgcgggaggtggcggcccattgggcgacaataaccaaggtgccgatggagtgggcaatgcctcgggagattggcattgcgattccacgtggatgggggacagagtcgtcaccaagtccacccgaacctgggtgctgcccagctacaacaaccaccagtaccgagagatcaaaagcggctccgtcgacggaagcaacgccaacgcctactttggatacagcaccccctgggggtactttgactttaaccgcttccacagccactggagcccccgagactggcaaagactcatcaacaactactggggcttcagaccccggtccctcagagtcaaaatcttcaacattcaagtcaaagaggtcacggtgcaggactccaccaccaccatcgccaacaacctcacctccaccgtccaagtgtttacggacgacgactaccagctgccctacgtcgtcggcaacgggaccgagggatgcctgccggccttccctccgcaggtctttacgctgccgcagtacggttacgcgacgctgaaccgcgacaacacagaaaatcccaccgagaggagcagcttcttctgcctagagtactttcccagcaagatgctgagaacgggcaacaactttgagtttacctacaactttgaggaggtgcccttccactccagcttcgctcccagtcagaacctgttcaagctggccaacccgctggtggaccagtacttgtaccgcttcgtgagcacaaataacactggcggagtccagttcaacaagaacctggccgggagatacgccaacacctacaaaaactggttcccggggcccatgggccgaacccagggctggaacctgggctccggggtcaaccgcgccagtgtcagcgccttcgccacgaccaataggatggagctcgagggcgcgagttaccaggtgcccccgcagccgaacggcatgaccaacaacctccagggcagcaacacctatgccctggagaacactatgatcttcaacagccagccggcgaacccgggcaccaccgccacgtacctcgagggcaacatgctcatcaccagcgagagcgagacgcagccggtgaaccgcgtggcgtacaacgtcggcgggcagatggccaccaacaaccagagctccaccactgcccccgcgaccggcacgtacaacctccaggaaatcgtgcccggcagcgtgtggatggagagggacgtgtacctccaaggacccatctgggccaagatcccagagacgggggcgcactttcacccctctccggccatgggcggattcggactcaaacacccaccgcccatgatgctcatcaagaacacgcctgtgcccggaaatatcaccagcttctcggccgtgcccgtcagcagcttcatcacccagtacagcaccgggcaggtcaccgtggagatggagtgggagctcaagaaggaaaactccaagaggtggaacccagagatccagtacacaaacaactacaacgacccccagtttgtggactttgccccggacagcaccggggaatacagaaccaccagacctatcggaacccgataccttacccgacccctttaacccattcatgtcgcataccctcaataaa

SEQ ID NO: 3554 - protein, 724 aa, Artificial Sequence
  Synthetic polypeptide
MSFVDHPPDWLEEVGEGLREFLGLEAGPPKPKPNQQHQDQARGLVLPGYNYLGPGNGLDRGEPVNRADEVAREHDISYNEQLEAGDNPYLKYNHADAEFQEKLADDTSFGGNLGKAVFQAKKRVLEPFGLVEEGAKTAPTGKRIDDHFPKRKKARTEEDSKPSTSSDAEAGPSGSQQLQIPAQPASSLGADTMSAGGGGPLGDNNQGADGVGNASGDWHCDSTWMGDRVVTKSTRTWVLPSYNNHQYREIKSGSVDGSNANAYFGYSTPWGYFDFNRFHSHWSPRDWQRLINNYWGFRPRSLRVKIFNIQVKEVTVQDSTTTIANNLTSTVQVFTDDDYQLPYVVGNGTEGCLPAFPPQVFTLPQYGYATLNRDNTENPTERSSFFCLEYFPSKMLRTGNNFEFTYNFEEVPFHSSFAPSQNLFKLANPLVDQYLYRFVSTNNTGGVQFNKNLAGRYANTYKNWFPGPMGRTQGWNLGSGVNRASVSAFATTNRMELEGASYQVPPQPNGMTNNLQGSNTYALENTMIFNSQPANPGTTATYLEGNMLITSESETQPVNRVAYNVGGQMATNNQSSTTAPATGTYNLQEIVPGSVWMERDVYLQGPIWAKIPETGAHFHPSPAMGGFGLKHPPPMMLIKNTPVPGNITSFSAVPVSSFITQYSTGQVTVEMEWELKKENSKRWNPEIQYTNNYNDPQFVDFAPDSTGEYRTTRPIGTRYLTRPL

SEQ ID NO: 3555 - DNA, 2203 bp, Artificial Sequence
  Synthetic polynucleotide
atgtcttttgttgatcaccctccagattggttggaagaagttggtgaaggtcttcgcgagtttttgggccttgaagcgggcccaccgaaaccaaaacccaatcagcagcatcaagatcaagcccgtggtcttgtgctgcctggttataactatctcggacccggaaacggtctcgatcgaggagagcctgtcaacagggcagacgaggtcgcgcgagagcacgacatctcgtacaacgagcagcttgaggcgggagacaacccctacctcaagtacaaccacgcggacgccgagtttcaggagaagctcgccgacgacacatccttcgggggaaacctcggaaaggcagtctttcaggccaagaaaagggttctcgaaccttttggcctggttgaagagggtgctaagacggcccctaccggaaagcggatagacgaccactttccaaaaagaaagaaggctcggaccgaagaggactccaagccttccacctcgtcagacgccgaagctggacccagcggatcccagcagctgcaaatcccagcccaaccagcctcaagtttgggagctgatacaatgtctgcgggaggtggcggcccattgggcgacaataaccaaggtgccgatggagtgggcaatgcctcgggagattggcattgcgattccacgtggatgggggacagagtcgtcaccaagtccacccgaacctgggtgctgcccagctacaacaaccaccagtaccgagagatcaaaagcggctccgtcgacggaagcaacgccaacgcctactttggatacagcaccccctgggggtactttgactttaaccgcttccacagccactggagcccccgagactggcaaagactcatcaacaactactggggcttcagaccccggtccctcagagtcaaaatcttcaacattcaagtcaaagaggtcacggtgcaggactccaccaccaccatcgccaacaacctcacctccaccgtccaagtgtttatggacgacgactaccagctgccctacgtcgtcggcaacgggaccgagggatgcctgccggccttccctccgcaggtctttacgctgccgcagtacggttacgcgacgctgaaccgcgacaacacagaaaatcccaccgagaggagcagcttcttctgcctagagtactttcccagcaagatgctgagaacgggcaacaactttgagtttacctacaactttgaggaggtgcccttccactccagcttcgctcccagtcagaacctgttcaagctggccaacccgctggtggaccagtacttgtaccgcttcgtgagcacaaataacactggcggagtccagttcaacaagaacctggccgggagatacgccaacacctacaaaaactggttcccggggcccatgggccgaacccagggctggaacctgggctccggggtcaaccgcgccagtgtcagcgccttcgccacgaccaataggatggagctcgagggcgcgagttaccaggtgcccccgcagccgaacggcatgaccaacaacctccagggcagcaacacctatgccctggagaacactatgatcttcaacagccagccggcgaacccgggcaccaccgccacgtacctcgagggcaacatgctcatcaccagcgagagcgagacgcagccggtgaaccgcgtggcgtacaacgtcggcgggcagatggccaccaacaaccagagctccaccactgcccccgcgaccggcacgtacaacctccaggaaatcgtgcccggcagcgtgtggatggagagggacgtgtacctccaaggacccatctgggccaagatcccagagacgggggcgcactttcacccctctccggccatgggcggattcggactcaaacacccaccgcccatgatgctcatcaagaacacgcctgtgcccggaaatatcaccagcttctcggacgtgcccgtcagcagcttcatcacccagtacagcaccgggcaggtcaccgtggagatggagtgggagctcaagaaggaaaactccaagaggtggaacccagagatccagtacacaaacaactacaacgacccccagtttgtggactttgccccggacagcaccggggaatacagaaccaccagacctatcggaacccgataccttacccgacccctttaacccattcatgtcgcataccctcaataaa

SEQ ID NO: 3556 - protein, 724 aa, Artificial Sequence
  Synthetic polypeptide
MSFVDHPPDWLEEVGEGLREFLGLEAGPPKPKPNQQHQDQARGLVLPGYNYLGPGNGLDRGEPVNRADEVAREHDISYNEQLEAGDNPYLKYNHADAEFQEKLADDTSFGGNLGKAVFQAKKRVLEPFGLVEEGAKTAPTGKRIDDHFPKRKKARTEEDSKPSTSSDAEAGPSGSQQLQIPAQPASSLGADTMSAGGGGPLGDNNQGADGVGNASGDWHCDSTWMGDRVVTKSTRTWVLPSYNNHQYREIKSGSVDGSNANAYFGYSTPWGYFDFNRFHSHWSPRDWQRLINNYWGFRPRSLRVKIFNIQVKEVTVQDSTTTIANNLTSTVQVFMDDDYQLPYVVGNGTEGCLPAFPPQVFTLPQYGYATLNRDNTENPTERSSFFCLEYFPSKMLRTGNNFEFTYNFEEVPFHSSFAPSQNLFKLANPLVDQYLYRFVSTNNTGGVQFNKNLAGRYANTYKNWFPGPMGRTQGWNLGSGVNRASVSAFATTNRMELEGASYQVPPQPNGMTNNLQGSNTYALENTMIFNSQPANPGTTATYLEGNMLITSESETQPVNRVAYNVGGQMATNNQSSTTAPATGTYNLQEIVPGSVWMERDVYLQGPIWAKIPETGAHFHPSPAMGGFGLKHPPPMMLIKNTPVPGNITSFSDVPVSSFITQYSTGQVTVEMEWELKKENSKRWNPEIQYTNNYNDPQFVDFAPDSTGEYRTTRPIGTRYLTRPL

SEQ ID NO: 3557 - DNA, 2203 bp, Artificial Sequence
  Synthetic polynucleotide
atgtcttttgttgatcaccctccagattggttggaagaagttggtgaaggtcttcgcgagtttttgggccttgaagcgggcccaccgaaaccaaaacccaatcagcagcatcaagatcaagcccgtggtcttgtgctgcctggttataactatctcggacccggaaacggtctcgatcgaggagagcctgtcaacagggcagacgaggtcgcgcgagagcacgacatctcgtacaacgagcagcttgaggcgggagacaacccctacctcaagtacaaccacgcggacgccgagtttcaggagaagctcgccgacgacacatccttcgggggaaacctcggaaaggcagtctttcaggccaagaaaagggttctcgaaccttttggcctggttgaagagggtgctaagacggcccctaccggaaagcggatagacgaccactttccaaaaagaaagaaggctcggaccgaagaggactccaagccttccacctcgtcagacgccgaagctggacccagcggatcccagcagctgcaaatcccagcccaaccagcctcaagtttgggagctgatacaatgtctgcgggaggtggcggcccattgggcgacaataaccaaggtgccgatggagtgggcaatgcctcgggagattggcattgcgattccacgtggatgggggacagagtcgtcaccaagtccacccgaacctgggtgctgcccagctacaacaaccaccagtaccgagagatcaaaagcggctccgtcgacggaagcaacgccaacgcctactttggatacagcaccccctgggggtactttgactttaaccgcttccacagccactggagcccccgagactggcaaagactcatcaacaactactggggcttcagaccccggtccctcagagtcaaaatcttcaacattcaagtcaaagaggtcacggtgcaggactccaccaccaccatcgccaacaacctcacctccaccgtcgatgtgtttacggacgacgactaccagctgccctacgtcgtcggcaacgggaccgagggatgcctgccggccttccctccgcaggtctttacgctgccgcagtacggttacgcgacgctgaaccgcgacaacacagaaaatcccaccgagaggagcagcttcttctgcctagagtactttcccagcaagatgctgagaacgggcaacaactttgagtttacctacaactttgaggaggtgcccttccactccagcttcgctcccagtcagaacctgttcaagctggccaacccgctggtggaccagtacttgtaccgcttcgtgagcacaaataacactggcggagtccagttcaacaagaacctggccgggagatacgccaacacctacaaaaactggttcccggggcccatgggccgaacccagggctggaacctgggctccggggtcaaccgcgccagtgtcagcgccttcgccacgaccaataggatggagctcgagggcgcgagttaccaggtgcccccgcagccgaacggcatgaccaacaacctccagggcagcaacacctatgccctggagaacactatgatcttcaacagccagccggcgaacccgggcaccaccgccacgtacctcgagggcaacatgctcatcaccagcgagagcgagacgcagccggtgaaccgcgtggcgtacaacgtcggcgggcagatggccaccaacaaccagagctccaccactgcccccgcgaccggcacgtacaacctccaggaaatcgtgcccggcagcgtgtggatggagagggacgtgtacctccaaggacccatctgggccaagatcccagagacgggggcgcactttcacccctctccggccatgggcggattcggactcaaacacccaccgcccatgatgctcatcaagaacacgcctgtgcccggaaatatcaccagcttctcggacgtgcccgtcagcagcttcatcacccagtacagcaccgggcaggtcaccgtggagatggagtgggagctcaagaaggaaaactccaagaggtggaacccagagatccagtacacaaacaactacaacgacccccagtttgtggactttgccccggacagcaccggggaatacagaaccaccagacctatcggaacccgataccttacccgacccctttaacccattcatgtcgcataccctcaataaa

SEQ ID NO: 3558 - protein, 724 aa, Artificial Sequence
  Synthetic polypeptide
MSFVDHPPDWLEEVGEGLREFLGLEAGPPKPKPNQQHQDQARGLVLPGYNYLGPGNGLDRGEPVNRADEVAREHDISYNEQLEAGDNPYLKYNHADAEFQEKLADDTSFGGNLGKAVFQAKKRVLEPFGLVEEGAKTAPTGKRIDDHFPKRKKARTEEDSKPSTSSDAEAGPSGSQQLQIPAQPASSLGADTMSAGGGGPLGDNNQGADGVGNASGDWHCDSTWMGDRVVTKSTRTWVLPSYNNHQYREIKSGSVDGSNANAYFGYSTPWGYFDFNRFHSHWSPRDWQRLINNYWGFRPRSLRVKIFNIQVKEVTVQDSTTTIANNLTSTVDVFTDDDYQLPYVVGNGTEGCLPAFPPQVFTLPQYGYATLNRDNTENPTERSSFFCLEYFPSKMLRTGNNFEFTYNFEEVPFHSSFAPSQNLFKLANPLVDQYLYRFVSTNNTGGVQFNKNLAGRYANTYKNWFPGPMGRTQGWNLGSGVNRASVSAFATTNRMELEGASYQVPPQPNGMTNNLQGSNTYALENTMIFNSQPANPGTTATYLEGNMLITSESETQPVNRVAYNVGGQMATNNQSSTTAPATGTYNLQEIVPGSVWMERDVYLQGPIWAKIPETGAHFHPSPAMGGFGLKHPPPMMLIKNTPVPGNITSFSDVPVSSFITQYSTGQVTVEMEWELKKENSKRWNPEIQYTNNYNDPQFVDFAPDSTGEYRTTRPIGTRYLTRPL

SEQ ID NO: 3559 - DNA, 2203 bp, Artificial Sequence
  Synthetic polynucleotide
atgtcttttgttgatcaccctccagattggttggaagaagttggtgaaggtcttcgcgagtttttgggccttgaagcgggcccaccgaaaccaaaacccaatcagcagcatcaagatcaagcccgtggtcttgtgctgcctggttataactatctcggacccggaaacggtctcgatcgaggagagcctgtcaacagggcagacgaggtcgcgcgagagcacgacatctcgtacaacgagcagcttgaggcgggagacaacccctacctcaagtacaaccacgcggacgccgagtttcaggagaagctcgccgacgacacatccttcgggggaaacctcggaaaggcagtctttcaggccaagaaaagggttctcgaaccttttggcctggttgaagagggtgctaagacggcccctaccggaaagcggatagacgaccactttccaaaaagaaagaaggctcggaccgaagaggactccaagccttccacctcgtcagacgccgaagctggacccagcggatcccagcagctgcaaatcccagcccaaccagcctcaagtttgggagctgatacaatgtctgcgggaggtggcggcccattgggcgacaataaccaaggtgccgatggagtgggcaatgcctcgggagattggcattgcgattccacgtggatgggggacagagtcgtcaccaagtccacccgaacctgggtgctgcccagctacaacaaccaccagtaccgagagatcaaaagcggctccgtcgacggaagcaacgccaacgcctactttggatacagcaccccctgggggtactttgactttaaccgcttccacagccactggagcccccgagactggcaaagactcatcaacaactactggggcttcagaccccggtccctcagagtcaaaatcttcaacattcaagtcaaagaggtcacggtgcaggactccaccaccaccatcgccaacaacctcacctccaccgtccaagtgtttacggacgacgactaccagctgccctacgtcgtcggcaacgggacccagggatgcctgccggccttccctccgcaggtctttacgctgccgcagtacggttacgcgacgctgaaccgcgacaacacagaaaatcccaccgagaggagcagcttcttctgcctagagtactttcccagcaagatgctgagaacgggcaacaactttgagtttacctacaactttgaggaggtgcccttccactccagcttcgctcccagtcagaacctgttcaagctggccaacccgctggtggaccagtacttgtaccgcttcgtgagcacaaataacactggcggagtccagttcaacaagaacctggccgggagatacgccaacacctacaaaaactggttcccggggcccatgggccgaacccagggctggaacctgggctccggggtcaaccgcgccagtgtcagcgccttcgccacgaccaataggatggagctcgagggcgcgagttaccaggtgcccccgcagccgaacggcatgaccaacaacctccagggcagcaacacctatgccctggagaacactatgatcttcaacagccagccggcgaacccgggcaccaccgccacgtacctcgagggcaacatgctcatcaccagcgagagcgagacgcagccggtgaaccgcgtggcgtacaacgtcggcgggcagatggccaccaacaaccagagctccaccactgcccccgcgaccggcacgtacaacctccaggaaatcgtgcccggcagcgtgtggatggagagggacgtgtacctccaaggacccatctgggccaagatcccagagacgggggcgcactttcacccctctccggccatgggcggattcggactcaaacacccaccgcccatgatgctcatcaagaacacgcctgtgcccggaaatatcaccagcttctcggacgtgcccgtcagcagcttcatcacccagtacagcaccgggcaggtcaccgtggagatggagtgggagctcaagaaggaaaactccaagaggtggaacccagagatccagtacacaaacaactacaacgacccccagtttgtggactttgccccggacagcaccggggaatacagaaccaccagacctatcggaacccgataccttacccgacccctttaacccattcatgtcgcataccctcaataaa

SEQ ID NO: 3560 - protein, 724 aa, Artificial Sequence
  Synthetic polypeptide
MSFVDHPPDWLEEVGEGLREFLGLEAGPPKPKPNQQHQDQARGLVLPGYNYLGPGNGLDRGEPVNRADEVAREHDISYNEQLEAGDNPYLKYNHADAEFQEKLADDTSFGGNLGKAVFQAKKRVLEPFGLVEEGAKTAPTGKRIDDHFPKRKKARTEEDSKPSTSSDAEAGPSGSQQLQIPAQPASSLGADTMSAGGGGPLGDNNQGADGVGNASGDWHCDSTWMGDRVVTKSTRTWVLPSYNNHQYREIKSGSVDGSNANAYFGYSTPWGYFDFNRFHSHWSPRDWQRLINNYWGFRPRSLRVKIFNIQVKEVTVQDSTTTIANNLTSTVQVFTDDDYQLPYVVGNGTQGCLPAFPPQVFTLPQYGYATLNRDNTENPTERSSFFCLEYFPSKMLRTGNNFEFTYNFEEVPFHSSFAPSQNLFKLANPLVDQYLYRFVSTNNTGGVQFNKNLAGRYANTYKNWFPGPMGRTQGWNLGSGVNRASVSAFATTNRMELEGASYQVPPQPNGMTNNLQGSNTYALENTMIFNSQPANPGTTATYLEGNMLITSESETQPVNRVAYNVGGQMATNNQSSTTAPATGTYNLQEIVPGSVWMERDVYLQGPIWAKIPETGAHFHPSPAMGGFGLKHPPPMMLIKNTPVPGNITSFSDVPVSSFITQYSTGQVTVEMEWELKKENSKRWNPEIQYTNNYNDPQFVDFAPDSTGEYRTTRPIGTRYLTRPL

SEQ ID NO: 3561 - DNA, 2203 bp, Artificial Sequence
  Synthetic polynucleotide
atgtcttttgttgatcaccctccagattggttggaagaagttggtgaaggtcttcgcgagtttttgggccttgaagcgggcccaccgaaaccaaaacccaatcagcagcatcaagatcaagcccgtggtcttgtgctgcctggttataactatctcggacccggaaacggtctcgatcgaggagagcctgtcaacagggcagacgaggtcgcgcgagagcacgacatctcgtacaacgagcagcttgaggcgggagacaacccctacctcaagtacaaccacgcggacgccgagtttcaggagaagctcgccgacgacacatccttcgggggaaacctcggaaaggcagtctttcaggccaagaaaagggttctcgaaccttttggcctggttgaagagggtgctaagacggcccctaccggaaagcggatagacgaccactttccaaaaagaaagaaggctcggaccgaagaggactccaagccttccacctcgtcagacgccgaagctggacccagcggatcccagcagctgcaaatcccagcccaaccagcctcaagtttgggagctgatacaatgtctgcgggaggtggcggcccattgggcgacaataaccaaggtgccgatggagtgggcaatgcctcgggagattggcattgcgattccacgtggatgggggacagagtcgtcaccaagtccacccgaacctgggtgctgcccagctacaacaaccaccagtaccgagagatcaaaagcggctccgtcgacggaagcaacgccaacgcctactttggatacagcaccccctgggggtactttgactttaaccgcttccacagccactggagcccccgagactggcaaagactcatcaacaactactggggcttcagaccccggtccctcagagtcaaaatcttcaacattcaagtcaaagaggtcacggtgcaggactccaccaccaccatcgccaacaacctcacctccaccgtccaagtgtttacggacgacgactaccagctgccctacgtcgtcggcaacgggaccgagggatgcctgccggccttccctccgcaggtctttacgctgccgcagtacggttacgcgacgctgaaccgcgacaacacagaaaatcccaccgagaggagcagcttcttctgcctagagtactttcccagcaagatgctgagaacgggcaacaactttgagtttacctacaactttgaggaggtgcccttccactccagcttcgctcccagtcagaacctgttcaagctggccaacccgctggtggaccagtacttgtaccgcttcgtgagcacaaataacactggcggagtccagttcaacaagaacctggccgggagatacgccaacacctacaaaaactggttcccggggcccatgggccgaacccagggctggaacctgggctccggggtcaaccgcgccagtgtcagcgccttcgccacgaccaataggatggagctcgagggcgcgagttaccaggtgcccccgcagccgaacggcatgaccaacaacctccagggcagcaacacctatgccctggagaacactatgatcttcaacagccagtcggcgaacccgggcaccaccgccacgtacctcgagggcaacatgctcatcaccagcgagagcgagacgcagccggtgaaccgcgtggcgtacaacgtcggcgggcagatggccaccaacaaccagagctccaccactgcccccgcgaccggcacgtacaacctccaggaaatcgtgcccggcagcgtgtggatggagagggacgtgtacctccaaggacccatctgggccaagatcccagagacgggggcgcactttcacccctctccggccatgggcggattcggactcaaacacccaccgcccatgatgctcatcaagaacacgcctgtgcccggaaatatcaccagcttctcggacgtgcccgtcagcagcttcatcacccagtacagcaccgggcaggtcaccgtggagatggagtgggagctcaagaaggaaaactccaagaggtggaacccagagatccagtacacaaacaactacaacgacccccagtttgtggactttgccccggacagcaccggggaatacagaaccaccagacctatcggaacccgataccttacccgacccctttaacccattcatgtcgcataccctcaataaa

SEQ ID NO: 3562 - protein, 724 aa, Artificial Sequence
  Synthetic polypeptide
MSFVDHPPDWLEEVGEGLREFLGLEAGPPKPKPNQQHQDQARGLVLPGYNYLGPGNGLDRGEPVNRADEVAREHDISYNEQLEAGDNPYLKYNHADAEFQEKLADDTSFGGNLGKAVFQAKKRVLEPFGLVEEGAKTAPTGKRIDDHFPKRKKARTEEDSKPSTSSDAEAGPSGSQQLQIPAQPASSLGADTMSAGGGGPLGDNNQGADGVGNASGDWHCDSTWMGDRVVTKSTRTWVLPSYNNHQYREIKSGSVDGSNANAYFGYSTPWGYFDFNRFHSHWSPRDWQRLINNYWGFRPRSLRVKIFNIQVKEVTVQDSTTTIANNLTSTVQVFTDDDYQLPYVVGNGTEGCLPAFPPQVFTLPQYGYATLNRDNTENPTERSSFFCLEYFPSKMLRTGNNFEFTYNFEEVPFHSSFAPSQNLFKLANPLVDQYLYRFVSTNNTGGVQFNKNLAGRYANTYKNWFPGPMGRTQGWNLGSGVNRASVSAFATTNRMELEGASYQVPPQPNGMTNNLQGSNTYALENTMIFNSQSANPGTTATYLEGNMLITSESETQPVNRVAYNVGGQMATNNQSSTTAPATGTYNLQEIVPGSVWMERDVYLQGPIWAKIPETGAHFHPSPAMGGFGLKHPPPMMLIKNTPVPGNITSFSDVPVSSFITQYSTGQVTVEMEWELKKENSKRWNPEIQYTNNYNDPQFVDFAPDSTGEYRTTRPIGTRYLTRPL

SEQ ID NO: 3563 - DNA, 2203 bp, Artificial Sequence
  Synthetic polynucleotide
atgtcttttgttgatcaccctccagattggttggaagaagttggtgaaggtcttcgcgagtttttgggccttgaagcgggcccaccgaaaccaaaacccaatcagcagcatcaagatcaagcccgtggtcttgtgctgcctggttataactatctcggacccggaaacggtctcgatcgaggagagcctgtcaacagggcagacgaggtcgcgcgagagcacgacatctcgtacaacgagcagcttgaggcgggagacaacccctacctcaagtacaaccacgcggacgccgagtttcaggagaagctcgccgacgacacatccttcgggggaaacctcggaaaggcagtctttcaggccaagaaaagggttctcgaaccttttggcctggttgaagagggtgctaagacggcccctaccggaaagcggatagacgaccactttccaaaaagaaagaaggctcggaccgaagaggactccaagccttccacctcgtcagacgccgaagctggacccagcggatcccagcagctgcaaatcccagcccaaccagcctcaagtttgggagctgatacaatgtctgcgggaggtggcggcccattgggcgacaataaccaaggtgccgatggagtgggcaatgcctcgggagattggcattgcgattccacgtggatgggggacagagtcgtcaccaagtccacccgaacctgggtgctgcccagctacaacaaccaccagtaccgagagatcaaaagcggctccgtcgacggaagcaacgccaacgcctactttggatacagcaccccctgggggtactttgactttaaccgcttccacagccactggagcccccgagactggcaaagactcatcaacaactactggggcttcagaccccggtccctcagagtcaaaatcttcaacattcaagtcaaagaggtcacggtgcaggactccaccaccaccatcgccaacaacctcacctccaccgtccaagtgtttacggacgacgactaccagctgccctacgtcgtcggcaacgggaccgagggatgcctgccggccttccctccgcaggtctttacgctgccgcagtacggttacgcgacgctgaaccgcgacaacacagaaaatcccaccgagaggagcagcttcttctgcctagagtactttcccagcaagatgctgagaacgggcaacaactttgagtttacctacaactttgaggaggtgcccttccactccagcttcgctcccagtcagaacctgttcaagctggccaacccgctggtggaccagtacttgtaccgcttcgtgagcacaaataacactggcggagtccagttcaacaagaacctggccgggagatacgccaacacctacaaaaactggttcccggggcccatgggccgaacccagggctggaacctgggctccggggtcaaccgcgccagtgtcagcgccttcgccacgaccaataggatggagctcgagggcgcgagttaccaggtgcccccgcagccgaacggcatgaccaacaacctccagggcagcaacacctatgccctggagaacactatgatcttcaacagccagggggcgaacccgggcaccaccgccacgtacctcgagggcaacatgctcatcaccagcgagagcgagacgcagccggtgaaccgcgtggcgtacaacgtcggcgggcagatggccaccaacaaccagagctccaccactgcccccgcgaccggcacgtacaacctccaggaaatcgtgcccggcagcgtgtggatggagagggacgtgtacctccaaggacccatctgggccaagatcccagagacgggggcgcactttcacccctctccggccatgggcggattcggactcaaacacccaccgcccatgatgctcatcaagaacacgcctgtgcccggaaatatcaccagcttctcggacgtgcccgtcagcagcttcatcacccagtacagcaccgggcaggtcaccgtggagatggagtgggagctcaagaaggaaaactccaagaggtggaacccagagatccagtacacaaacaactacaacgacccccagtttgtggactttgccccggacagcaccggggaatacagaaccaccagacctatcggaacccgataccttacccgacccctttaacccattcatgtcgcataccctcaataaa

SEQ ID NO: 3564 - protein, 724 aa, Artificial Sequence
  Synthetic polypeptide
MSFVDHPPDWLEEVGEGLREFLGLEAGPPKPKPNQQHQDQARGLVLPGYNYLGPGNGLDRGEPVNRADEVAREHDISYNEQLEAGDNPYLKYNHADAEFQEKLADDTSFGGNLGKAVFQAKKRVLEPFGLVEEGAKTAPTGKRIDDHFPKRKKARTEEDSKPSTSSDAEAGPSGSQQLQIPAQPASSLGADTMSAGGGGPLGDNNQGADGVGNASGDWHCDSTWMGDRVVTKSTRTWVLPSYNNHQYREIKSGSVDGSNANAYFGYSTPWGYFDFNRFHSHWSPRDWQRLINNYWGFRPRSLRVKIFNIQVKEVTVQDSTTTIANNLTSTVQVFTDDDYQLPYVVGNGTEGCLPAFPPQVFTLPQYGYATLNRDNTENPTERSSFFCLEYFPSKMLRTGNNFEFTYNFEEVPFHSSFAPSQNLFKLANPLVDQYLYRFVSTNNTGGVQFNKNLAGRYANTYKNWFPGPMGRTQGWNLGSGVNRASVSAFATTNRMELEGASYQVPPQPNGMTNNLQGSNTYALENTMIFNSQGANPGTTATYLEGNMLITSESETQPVNRVAYNVGGQMATNNQSSTTAPATGTYNLQEIVPGSVWMERDVYLQGPIWAKIPETGAHFHPSPAMGGFGLKHPPPMMLIKNTPVPGNITSFSDVPVSSFITQYSTGQVTVEMEWELKKENSKRWNPEIQYTNNYNDPQFVDFAPDSTGEYRTTRPIGTRYLTRPL

SEQ ID NO: 3565 - DNA, 2194 bp, Artificial Sequence
  Synthetic polynucleotide
atgtcttttgttgatcaccctccagattggttggaagaagttggtgaaggtcttcgcgagtttttgggccttgaagcgggcccaccgaaaccaaaacccaatcagcagcatcaagatcaagcccgtggtcttgtgctgcctggttataactatctcggacccggaaacggtctcgatcgaggagagcctgtcaacagggcagacgaggtcgcgcgagagcacgacatctcgtacaacgagcagcttgaggcgggagacaacccctacctcaagtacaaccacgcggacgccgagtttcaggagaagctcgccgacgacacatccttcgggggaaacctcggaaaggcagtctttcaggccaagaaaagggttctcgaaccttttggcctggttgaagagggtgctaagacggcccctaccggaaagcggatagacgaccactttccaaaaagaaagaaggctcggaccgaagaggactccaagccttccacctcgtcagacgccgaagctggacccagcggatcccagcagctgcaaatcccagcccaaccagcctcaagtttgggagctgatacaatgtctgcgggaggtggcggcccattgggcgacaataaccaaggtgccgatggagtgggcaatgcctcgggagattggcattgcgattccacgtggatgggggacagagtcgtcaccaagtccacccgaacctgggtgctgcccagctacaacaaccaccagtaccgagagatcaaaagcggctccgtcgacggaagcaacgccaacgcctactttggatacagcaccccctgggggtactttgactttaaccgcttccacagccactggagcccccgagactggcaaagactcatcaacaactactggggcttcagaccccggtccctcagagtcaaaatcttcaacattcaagtcaaagaggtcacggtgcaggactccaccaccaccatcgccaacaacctcacctccaccgtccaagtgtttacggacgacgactaccagctgccctacgtcgtcggcaacgggaccgagggatgcctgccggccttccctccgcaggtctttacgctgccgcagtacggttacgcgacgctgaaccgcgacaacacagaaaatcccaccgagaggagcagcttcttctgcctagagtactttcccagcaagatgctgagaacgggcaacaactttgagtttacctacaactttgaggaggtgcccttccactccagcttcgctcccagtcagaacctgttcaagctggccaacccgctggtggaccagtacttgtaccgcttcgtgagcacaaataacactggcggagtccagttcaacaagaacctggccgggagatacgccaacacctacaaaaactggttcccggggcccatgggccgaacccagggctggaacctgggctccggggtcaaccgcgccagtgtcagcgccttcgccacgaccaataggatggagctcgagggcgcgagttaccaggtgcccccgcagccgaacggcatgaccaacaacctccagggcagcaacacctatgccctggagaacactatgatcttcgggaagcaaggctcagagaaaacaaatgtggacattgaaaaggtcatgatcaccagcgagagcgagacgcagccggtgaaccgcgtggcgtacaacgtcggcgggcagatggccaccaacaaccagagctccaccactgcccccgcgaccggcacgtacaacctccaggaaatcgtgcccggcagcgtgtggatggagagggacgtgtacctccaaggacccatctgggccaagatcccagagacgggggcgcactttcacccctctccggccatgggcggattcggactcaaacacccaccgcccatgatgctcatcaagaacacgcctgtgcccggaaatatcaccagcttctcggacgtgcccgtcagcagcttcatcacccagtacagcaccgggcaggtcaccgtggagatggagtgggagctcaagaaggaaaactccaagaggtggaacccagagatccagtacacaaacaactacaacgacccccagtttgtggactttgccccggacagcaccggggaatacagaaccaccagacctatcggaacccgataccttacccgacccctttaacccattcatgtcgcataccctcaataaa

SEQ ID NO: 3566 - protein, 721 aa, Artificial Sequence
  Synthetic polypeptide
MSFVDHPPDWLEEVGEGLREFLGLEAGPPKPKPNQQHQDQARGLVLPGYNYLGPGNGLDRGEPVNRADEVAREHDISYNEQLEAGDNPYLKYNHADAEFQEKLADDTSFGGNLGKAVFQAKKRVLEPFGLVEEGAKTAPTGKRIDDHFPKRKKARTEEDSKPSTSSDAEAGPSGSQQLQIPAQPASSLGADTMSAGGGGPLGDNNQGADGVGNASGDWHCDSTWMGDRVVTKSTRTWVLPSYNNHQYREIKSGSVDGSNANAYFGYSTPWGYFDFNRFHSHWSPRDWQRLINNYWGFRPRSLRVKIFNIQVKEVTVQDSTTTIANNLTSTVQVFTDDDYQLPYVVGNGTEGCLPAFPPQVFTLPQYGYATLNRDNTENPTERSSFFCLEYFPSKMLRTGNNFEFTYNFEEVPFHSSFAPSQNLFKLANPLVDQYLYRFVSTNNTGGVQFNKNLAGRYANTYKNWFPGPMGRTQGWNLGSGVNRASVSAFATTNRMELEGASYQVPPQPNGMTNNLQGSNTYALENTMIFGKQGSEKTNVDIEKVMITSESETQPVNRVAYNVGGQMATNNQSSTTAPATGTYNLQEIVPGSVWMERDVYLQGPIWAKIPETGAHFHPSPAMGGFGLKHPPPMMLIKNTPVPGNITSFSDVPVSSFITQYSTGQVTVEMEWELKKENSKRWNPEIQYTNNYNDPQFVDFAPDSTGEYRTTRPIGTRYLTRPL

SEQ ID NO: 3567 - protein, 519 aa, Artificial Sequence
  Synthetic polypeptide
DGVGSSSGNWHCDSTWLGDRVITTSTRTWALPTYNNHLYKQISNGTSGGATNDNTYFGYSTPWGYFDFNRFHCHFSPRDWQRLINNNWGFRPKRLSFKLFNIQVKEVTQNEGTKTIANNLTSTIQVFTDSEYQLPYVLGSAHQGCLPPFPADVFMIPQYGYLTLNNGSQAVGRSSFYCLEYFPSQMLRTGNNFQFTYTFEDVPFHSSYAHSQSLDRLMNPLIDQYLYYLSRTQTTGGTANTQTLGFSQGGPNTMANQAKNWLPGPCYRQQRVSTTTGQNNNSNFAWTAGTKYHLNGRNSLANPGIAMATHKDDEERFFPSNGILIFGKQNAARDNADYSDVMLTSEEEIKTTNPVATEEYGIVADNLQQQNTAPQIGTVNSQGALPGMVWQNRDVYLQGPIWAKIPHTDGNFHPSPLMGGFGLKHPPPQILIKNTPVPADPPTTFNQSKLNSFITQYSTGQVSVEIEWELQKENSKRWNPEIQYTSNYYKSTSVDFAVNTEGVYSEPRPIGTRYLTRNL

SEQ ID NO: 3568 - protein, 738 aa, Artificial Sequence
  Synthetic polypeptide
MAADGYLPDWLEDNLSEGIREWWALQPGAPKPKANQQHQDNARGLVLPGYKYLGPGNGLDKGEPVNAADAAALEHDKAYDQQLKAGDNPYLKYNHADAEFQERLKEDTSFGGNLGRAVFQAKKRLLEPLGLVEEAAKTAPGKKRPVEPSPQRSPDSSTGIGKKGQQPARKRLNFGQTGDSESVPDPQPLGEPPAAPSGVGPNTMAAGGGAPMADNNEGADGVGSSSGNWHCDSTWLGDRVITTSTRTWALPTYNNHLYKQISNGTSGGATNDNTYFGYSTPWGYFDFNRFHCHFSPRDWQRLINNNWGFRPKRLSFKLFNIQVKEVTQNEGTKTIANNLTSTIQVFTDSEYQLPYVLGSAHQGCLPPFPADVFMIPQYGYLTLNNGSQAVGRSSFYCLEYFPSQMLRTGNNFQFTYTFEDVPFHSSYAHSQSLDRLMNPLIDQYLYYLSRTQTTGGTANTQTLGFSQGGPNTMANQAKNWLPGPCYRQQRVSTTTGQNNNSNFAWTAGTKYHLNGRNSLANPGIAMATHKDDEERFFPSNGILIFGKQNAARDNADYSDVMLTSEEEIKTTNPVATEEYGIVADNLQQQNTAPQIGTVNSQGALPGMVWQNRDVYLQGPIWAKIPHTDGNFHPSPLMGGFGLKHPPPQILIKNTPVPADPPTTFNQSKLNSFITQYSTGQVSVEIEWELQKENSKRWNPEIQYTSNYYKSTSVDFAVNTEGVYSEPRPIGTRYLTRNL

SEQ ID NO: 3569 - protein, 725 aa, Artificial Sequence
  Synthetic polypeptide
MAADGYLPDWLEDNLSEGIREWWALQPGAPKPKANQQHQDNARGLVLPGYKYLGPGNGLDKGEPVNAADAAALEHDKAYDQQLKAGDNPYLKYNHADAEFQERLKEDTSFGGNLGRAVFQAKKRLLEPLGLVEEAAKTAPTGKRIDDHFPKRKKARTEEDSKPSTSSDAEAGPSGSQQLQIPAQPASSLGADTMSAGGGGPLGDNNQGADGVGNASGDWHCDSTWMGDRVVTKSTRTWVLPSYNNHQYREIKSGSVDGSNANAYFGYSTPWGYFDFNRFHSHWSPRDWQRLINNYWGFRPRSLRVKIFNIQVKEVTVQDSTTTIANNLTSTVQVFTDDDYQLPYVVGNGTEGCLPAFPPQVFTLPQYGYATLNRDNTENPTERSSFFCLEYFPSKMLRTGNNFEFTYNFEEVPFHSSFAPSQNLFKLANPLVDQYLYRFVSTNNTGGVQFNKNLAGRYANTYKNWFPGPMGRTQGWNLGSGVNRASVSAFATTNRMELEGASYQVPPQPNGMTNNLQGSNTYALENTMIFNSQPANPGTTATYLEGNMLITSESETQPVNRVAYNVGGQMATNNQSSTTAPATGTYNLQEIVPGSVWMERDVYLQGPIWAKIPETGAHFHPSPAMGGFGLKHPPPMMLIKNTPVPGNITSFSDVPVSSFITQYSTGQVTVEMEWELKKENSKRWNPEIQYTNNYNDPQFVDFAPDSTGEYRTTRPIGTRYLTRPL

SEQ ID NO: 3570 - protein, 736 aa, Artificial Sequence
  Synthetic polypeptide
MAADGYLPDWLEDNLSEGIREWWALKPGAPKPKANQQKQDDGRGLVLPGYKYLGPFNGLDKGEPVNAADAAALEHDKAYDQQLQAGDNPYLRYNHADAEFQERLQEDTSFGGNLGRAVFQAKKRVLEPLGLVEEGAKTAPGKKRPVDQSPQEPDSSSGVGKSGKQPARKRLNFGQTGDSESVPDPQPLGEPPAAPTSLGSNTMASGGGAPMADNNEGADGVGNSSGNWHCDSQWLGDRVITTSTRTWALPTYNNHLYKQISSQSGASNDNHYFGYSTPWGYFDFNRFHCHFSPRDWQRLINNNWGFRPKKLSFKLFNIQVKEVTQNDGTTTIANNLTSTVQVFTDSEYQLPYVLGSAHQGCLPPFPADVFMVPQYGYLTLNNGSQAVGRSSFYCLEYFPSQMLRTGNNFQFSYTFEDVPFHSSYAHSQSLDRLMNPLIDQYLYYLNRTQGTTSGTTNQSRLLFSQAGPQSMSLQARNWLPGPCYRQQRLSKTANDNNNSNFPWTAASKYHLNGRDSLVNPGPAMASHKDDEEKFFPMHGNLIFGKEGTTASNAELDNVMITDEEEIRTTNPVATEQYGTVANNLQSSNTAPTTRTVNDQGALPGMVWQDRDVYLQGPIWAKIPHTDGHFHPSPLMGGFGLKHPPPQIMIKNTPVPANPPTTFSPAKFASFITQYSTGQVSVEIEWELQKENSKRWNPEIQYTSNYNKSVNVDFTVDTNGVYSEPRPIGTRYLTRNL

SEQ ID NO: 3571 - protein, 735 aa, Artificial Sequence
  Synthetic polypeptide
MSFVDHPPDWLEEVGEGLREFLGLEAGPPKPKPNQQHQDQARGLVLPGYNYLGPGNGLDRGEPVNRADEVAREHDISYNEQLEAGDNPYLKYNHADAEFQEKLADDTSFGGNLGKAVFQAKKRVLEPFGLVEEGAKTAPGKKRPVDQSPQEPDSSSGVGKSGKQPARKRLNFGQTGDSESVPDPQPLGEPPAAPTSLGSNTMASGGGAPMADNNEGADGVGNSSGNWHCDSQWLGDRVITTSTRTWALPTYNNHLYKQISSQSGASNDNHYFGYSTPWGYFDFNRFHCHFSPRDWQRLINNNWGFRPKKLSFKLFNIQVKEVTQNDGTTTIANNLTSTVQVFTDSEYQLPYVLGSAHQGCLPPFPADVFMVPQYGYLTLNNGSQAVGRSSFYCLEYFPSQMLRTGNNFQFSYTFEDVPFHSSYAHSQSLDRLMNPLIDQYLYYLNRTQGTTSGTTNQSRLLFSQAGPQSMSLQARNWLPGPCYRQQRLSKTANDNNNSNFPWTAASKYHLNGRDSLVNPGPAMASHKDDEEKFFPMHGNLIFGKEGTTASNAELDNVMITDEEEIRTTNPVATEQYGTVANNLQSSNTAPTTRTVNDQGALPGMVWQDRDVYLQGPIWAKIPHTDGHFHPSPLMGGFGLKHPPPQIMIKNTPVPANPPTTFSPAKFASFITQYSTGQVSVEIEWELQKENSKRWNPEIQYTSNYNKSVNVDFTVDTNGVYSEPRPIGTRYLTRPL

SEQ ID NO: 3572 - protein, 736 aa, Artificial Sequence
  Synthetic polypeptide
MAADGYLPDWLEDNLSEGIREWWALKPGAPKPKANQQKQDDGRGLVLPGYKYLGPFNGLDKGEPVNAADAAALEHDKAYDQQLQAGDNPYLRYNHADAEFQERLQEDTSFGGNLGRAVFQAKKRVLEPLGLVEEGAKTAPGKKRPVEPSPQRSPDSSTGIGKKGQQPARKRLNFGQTGDSESVPDPQPLGEPPAAPSGVGPNTMAAGGGAPMADNNEGADGVGSSSGNWHCDSTWLGDRVITTSTRTWALPTYNNHLYKQISSQSGASNDNHYFGYSTPWGYFDFNRFHCHFSPRDWQRLINNNWGFRPKRLSFKLFNIQVKEVTQNEGTKTIANNLTSTIQVFTDSEYQLPYVLGSAHQGCLPPFPADVFMIPQYGYLTLNNGSQAVGRSSFYCLEYFPSQMLRTGNNFQFTYTFEDVPFHSSYAHSQSLDRLMNPLIDQYLYYLSRTQTTGGTANTQTLGFSQGGPNTMANQAKNWLPGPCYRQQRVSTTTGQNNNSNFAWTAGTKYHLNGRNSLANPGIAMATHKDDEERFFPSNGILIFGKQGTTASNAELDNVMITDEEEIKTTNPVATEEYGIVADNLQQQNTAPQIGTVNSQGALPGMVWQNRDVYLQGPIWAKIPHTDGNFHPSPLMGGFGLKHPPPQILIKNTPVPADPPTTFNQSKLNSFITQYSTGQVSVEIEWELQKENSKRWNPEIQYTSNYNKSVNVDFTVDTNGVYSEPRPIGTRYLTRNL

SEQ ID NO: 3573 - protein, 736 aa, Artificial Sequence
  Synthetic polypeptide
MAADGYLPDWLEDNLSEGIREWWALKPGAPKPKANQQKQDDGRGLVLPGYKYLGPFNGLDKGEPVNAADAAALEHDKAYDQQLQAGDNPYLRYNHADAEFQERLQEDTSFGGNLGRAVFQAKKRVLEPLGLVEEGAKTAPGKKRPVEPSPQRSPDSSTGIGKKGQQPARKRLNFGQTGDSESVPDPQPLGEPPAAPSGVGPNTMAAGGGAPMADNNEGADGVGSSSGNWHCDSTWLGDRVITTSTRTWALPTYNNHLYKQISSQSGASNDNHYFGYSTPWGYFDFNRFHCHFSPRDWQRLINNNWGFRPKRLSFKLFNIQVKEVTQNEGTKTIANNLTSTIQVFTDSEYQLPYVLGSAHQGCLPPFPADVFMIPQYGYLTLNNGSQAVGRSSFYCLEYFPSQMLRTGNNFQFTYTFEDVPFHSSYAHSQSLDRLMNPLIDQYLYYLSRTQTTGGTANTQTLGFSQGGPNTMANQAKNWLPGPCYRQQRVSTTTGQNNNSNFAWTAGTKYHLNGRNSLANPGIAMATHKDDEERFFPSNGILIFGKQNAARDNADYSDVMLTSEEEIKTTNPVATEEYGIVADNLQQQNTAPQIGTVNSQGALPGMVWQNRDVYLQGPIWAKIPHTDGNFHPSPLMGGFGLKHPPPQILIKNTPVPADPPTTFNQSKLNSFITQYSTGQVSVEIEWELQKENSKRWNPEIQYTSNYYKSTSVDFAVNTEGVYSEPRPIGTRYLTRNL

SEQ ID NO: 3574 - protein, 736 aa, Artificial Sequence
  Synthetic polypeptide
MAADGYLPDWLEDNLSEGIREWWDLKPGAPKPKANQQKQDDGRGLVLPGYKYLGPFNGLDKGEPVNAADAAALEHDKAYDQQLKAGDNPYLRYNHADAEFQERLQEDTSFGGNLGRAVFQAKKRVLEPLGLVEEGAKTAPGKKRPVEQSPQEPDSSSGIGKTGQQPAKKRLNFGQTGDTESVPDPQPLGEPPAAPSGLGPNTMASGGGAPMADNNEGADGVGNSSGNWHCDSTWLGDRVITTSTRTWALPTYNNHLYKQISNGTSGGSTNDNTYFGYSTPWGYFDFNRFHCHFSPRDWQRLINNNWGFRPKRLNFKLFNIQVKEVTTNEGTKTIANNLTSTVQVFTDSEYQLPYVLGSAHQGCLPPFPADVFMVPQYGYLTLNNGSQALGRSSFYCLEYFPSQMLRTGNNFQFSYTFEDVPFHSSYAHSQSLDRLMNPLIDQYLYYLVRTQTTGTGGTQTLAFSQAGPSSMASQARNWVPGPSYRQQRVSTTTNQNNNSNFAWTGAAKFKLNGRDSLMNPGVAMASHKDDEDRFFPSSGVLIFGKQGAGNDGVDYSQVLITDEEEIKATNPVATEEYGAVAINNQAANTQAQTGLVHNQGVIPGMVWQNRDVYLQGPIWAKIPHTDGNFHPSPLMGGFGLKHPPPQILIKNTPVPADPPLTFNQAKLNSFITQYSTGQVSVEIEWELQKENSKRWNPEIQYTSNYYKSTNVDFAVNTEGVYSEPRPIGTRYLTRNL

SEQ ID NO: 3575 - DNA, 3695 bp, Artificial Sequence
  Synthetic polynucleotide
ctctttgcgcttgcgttttcccttgtccagatagcccagtagctgacattcatccggggtcagcaccgtttctgcggactggctttctacgtgaaaaggatctaggtgaagatcctttttgataatctcatgcctgacatttatattccccagaacatcaggttaatggcgtttttgatgtcattttcgcggtggctgagatcagccacttcttccccgataacggagaccggcacactggccatatcggtggtcatcatgcgccagctttcatccccgatatgcaccaccgggtaaagttcacgggagactttatctgacagcagacgtgcactggccagggggatcaccatccgtcgccccggcgtgtcaataatatcactctgtacatccacaaacagacgataacggctctctcttttataggtgtaaaccttaaactgccgtacgtataggctgcgcaactgttgggaagggcgatcggtgcgggcctcttcgctattacgccagctggcgaaagggggatgtgctgcaaggcgattaagttgggtaacgccagggttttcccagtcacgacgttgtaaaacgacggccagtgaattgtaatacgactcactatagggcgaattgaatttagcggccgcgaattcgcccttatgatatctggtgggaggagggcaagatgacggccaaggtcgtggagtccgccaaggccattctcggcggcagcaaagtgcgcgtggaccaaaagtgcaagtcgtccgcccagatcgatcccactcccgtcattgtcacctccaacaccaacatgtgcgccgtgattgacgggaacagcaccaccttcgagcaccagcagccgttgcaggaccggatgttcaaatttgaacttacccgccgtctggagcatgactttggcaaggtgacaaagcaggaagtcaaagagttcttccgctgggcgcaggatcacgtgaccgaggtggcgcatgagttccacgtcagaaagggtggagccaacaagagacccgcccccgatgacgctgataaaagcgagcccaagcgggcctgcccctcagtcgcagatccatcgacgtcagacgcggaaggagctccggtggactttgccgacaggtaccaaaacaaatgttctcgtcacgcgggcatgcttcagatgctgtttccctgcaagacatgcgagagaatgaatcagaatttcaacatttgcttcacgcacgggaccagggactgttcggagtgcttccccggcgtgtcagaatctcaaccggtcgtcagaaaaaggacgtatcggaaactctgtgccattcatcatctgctggggagggctcccgagattgcttgctcggcctgcgatctggtcaacgtggacctggatgactgtgtctctgagcaataaatgacttaaaccaggtatggctgccgatggttatcttccagattggctcgaggacaacctctctgagggcattcgcgagtggtgggacttgaaacctggagccccgaaacccaaagccaaccagcaaaagcaggacgacggccggggtctggtgcttcctggctacaagtacctcggacccttcaacggactcgacaagggggagcccgtcaacgcggcggacgcagcggccctcgagcacgacaaggcctacgaccagcagctcaaagcgggtgacaatccgtacctgcggtataaccacgccgacgccgagtttcaggagcgtctgcaagaagatacgtcttttgggggcaacctcgggcgagcagtcttccaggccaagaagcgggttctcgaacctctcggtctggttgaggaaggcgctaagacggctcctggaaagaagagaccggtagagcagtcaccccaagaaccagactcctcatcgggcatcggcaagacaggccagcagcccgctaaaaagagactcaattttggtcagactggcgacacagagtcagtccccgacccacaacctctcggagaacctccagcagccccctcaggtctgggacctaatacaatggcttcaggcggtggcgctccaatggcagacaataacgaaggcgccgacggagtgggtaattcctcgggaaattggcattgcgattccacatggctgggggacagagtcatcaccaccagcacccgaacctgggccctgcccacctacaacaaccacctctacaagcaaatctccaacggcacctcgggaggaagcaccaacgacaacacctactttggctacagcaccccctgggggtattttgacttcaacagattccactgccacttttcaccacgtgactggcagcgactcatcaacaacaattggggattccggcccaagagactcaacttcaagctcttcaacatccaggtcaaggaagtcacgacgaacgaaggcaccaagaccatcgccaataatctcaccagcaccgtgcaggtctttacggactcggagtaccagctaccgtacgtgctaggatcagctcaccagggatgtctgcctccgttcccggcggacgtcttcatggttcctcagtacggttatctaactctgaacaatggcagccaggccctgggacgttcctccttctactgcctggagtatttcccatcgcagatgctgagaaccggcaacaactttcagttcagctacaccttcgaggacgtgcctttccacagcagctacgcgcacagccaaagcctggacaggctgatgaatcccctcatcgaccagtacctgtattacctggtcagaacgcagacaaccgggactggagggacgcagactctggcattcagccaagcaggccctagctcaatggccagccaggctagaaactgggtgcccggaccgagctaccggcagcagcgcgtctccacgacaaccaaccagaacaacaacagcaactttgcctggacgggagctgccaaatttaaactgaacggccgagactctctaatgaaccccggcgtggccatggcttcacacaaggatgacgaggaccgcttcttcccttctagcggggtcctgattttcggcaagcaaggagccgggaatgatggagtggattacagccaagtgctgattacagatgaggaagaaatcaaggctaccaaccccgtggcaacagaggaatatggagcagtggccatcaacaaccaggccgctaatacgcaggcgcagaccggactcgtgcacaaccagggggtgattcccggcatggtgtggcagaacagagacgtgtacctgcagggtcccatctgggccaaaattcctcacacggacggcaactttcacccgtctcccctgatgggcggctttggactgaagcacccgcctcctcaaattctcatcaagaacacaccggttccagcggacccgccgcttaccttcaaccaggccaagctgaactctttcatcacgcagtacagcaccggacaggtcagcgtggaaatcgagtgggagctgcagaaagaaaacagcaaacgctggaatccagagattcagtacacttccaactactacaaatctacaaatgtggactttgctgtcaacacggaaggagtgtatagcgagcctcgccccattggcacccgttacctcacccgcaacctgtaattgcctgttaatcaataaaccggttaattcgtttcagtaaggaagaattcgtttaaa

SEQ ID NO: 3576 - protein, 736 aa, Artificial Sequence; identical to SEQ ID NO: 2895
  Synthetic polypeptide

SEQ ID NO: 3577 - protein, 736 aa, Artificial Sequence
  Synthetic polypeptide
MAADGYLPDWLEDNLSEGIREWWDLKPGAPKPKANQQKQDDGRGLVLPGYKYLGPFNGLDKGEPVNAADAAALEHDKAYDQQLKAGDNPYLRYNHADAEFQERLQEDTSFGGNLGRAVFQAKKRVLEPLGLVEEGAKTAPGKKRPVEQSPQEPDSSSGIGKTGQQPAKKRLNFGQTGDTESVPDPQPLGEPPAAPSGLGPNTMASGGGAPMADNNEGADGVGNSSGNWHCDSTWLGDRVITTSTRTWALPTYNNHLYKQISNGTSGGSTNDNTYFGYSTPWGYFDFNRFHCHFSPRDWQRLINNNWGFRPKRLNFKLFNIQVKEVTTNEGTKTIANNLTSTVQVFTDSEYQLPYVLGSAHQGCLPPFPADVFMVPQYGYLTLNNGSQALGRSSFYCLEYFPSQMLRTGNNFQFSYTFEDVPFHSSYAHSQSLDRLMNPLIDQYLYYLVRTQTTGTGGTQTLAFSQAGPSNMASQARNWVPGPSYRQQRVSTTTNQNNNSNFAWTGAAKFKLNGRDSLMNPGVAMASHKDDEDRFFPSSGVLIFGKQGAGNDGVDYSQVLITDEEEIKATNPVATEEYGAVAINNQAANTQAQTGLVHNQGVIPGMVWQNRDVYLQGPIWAKIPHTDGNFHPSPLMGGFGLKHPPPQILIKNTPVPADPPLTFNQAKLNSFITQYSTGQVSVEIEWELQKENSKRWNPEIQYTSNYYKSTNVDFAVNTEGVYSEPRPIGTRYLTRNL

SEQ ID NO: 3578 - protein, 738 aa, Artificial Sequence; identical to SEQ ID NO: 3272
  Synthetic polypeptide

SEQ ID NO: 3579 - protein, 736 aa, Artificial Sequence
  Synthetic polypeptide
MAADGYLPDWLEDNLSEGIREWWALQPGAPKPKANQQHQDNARGLVLPGYKYLGPGNGLDKGEPVNAADAAALEHDKAYDQQLKAGDNPYLKYNHADAEFQERLKEDTSFGGNLGRAVFQAKKRILEPLGLVEEAAKTAPGKKRPVDQSPQEPDSSSGVGKSGKQPARKRLNFGQTGDSESVPDPQPLGEPPAAPTSLGSNTMASGGGAPMADNNEGADGVGNSSGNWHCDSQWLGDRVITTSTRTWALPTYNNHLYKQISSQSGASNDNHYFGYSTPWGYFDFNRFHCHFSPRDWQRLINNNWGFRPKKLSFKLFNIQVKEVTQNDGTTTIANNLTSTVQVFTDSEYQLPYVLGSAHQGCLPPFPADVFMVPQYGYLTLNNGSQAVGRSSFYCLEYFPSQMLRTGNNFQFSYTFEDVPFHSSYAHSQSLDRLMNPLIDQYLYYLNRTQGTTSGTTNQSRLLFSQAGPQSMSLQARNWLPGPCYRQQRLSKTANDNNNSNFPWTAASKYHLNGRDSLVNPGPAMASHKDDEEKFFPMHGNLIFGKEGTTASNAELDNVMITDEEEIRTTNPVATEQYGTVANNLQSSNTAPTTRTVNDQGALPGMVWQDRDVYLQGPIWAKIPHTDGHFHPSPLMGGFGLKHPPPQIMIKNTPVPANPPTTFSPAKFASFITQYSTGQVSVEIEWELQKENSKRWNPEIQYTSNYNKSVNVDFTVDTNGVYSEPRPIGTRYLTRPL

SEQ ID NO: 3580 - protein, 736 aa, Artificial Sequence
  Synthetic polypeptide
MAADGYLPDWLEDNLSEGIREWWALQPGAPKPKANQQHQDNARGLVLPGYKYLGPGNGLDKGEPVNAADAAALEHDKAYDQQLKAGDNPYLKYNHADAEFQERLKEDTSFGGNLGRAVFQAKKRLLEPLGLVEEAAKTAPGKKRPVDQSPQEPDSSSGVGKSGKQPARKRLNFGQTGDSESVPDPQPLGEPPAAPTSLGSNTMASGGGAPMADNNEGADGVGNSSGNWHCDSQWLGDRVITTSTRTWALPTYNNHLYKQISSQSGASNDNHYFGYSTPWGYFDFNRFHCHFSPRDWQRLINNNWGFRPKKLSFKLFNIQVKEVTQNDGTTTIANNLTSTVQVFTDSEYQLPYVLGSAHQGCLPPFPADVFMVPQYGYLTLNNGSQAVGRSSFYCLEYFPSQMLRTGNNFQFSYTFEDVPFHSSYAHSQSLDRLMNPLIDQYLYYLNRTQGTTSGTTNQSRLLFSQAGPQSMSLQARNWLPGPCYRQQRLSKVANDNNNSNFPWTAASKYHLNGRDSLVNPGPAMASHKDDEEKFFPMHGNLIFGKEGTTASNAELDNVMITDEEEIRTTNPVATEQYGTVANNLQSSNTAPTTRTVNDQGALPGMVWQDRDVYLQGPIWAKIPHTDGHFHPSPLMGGFGLKHPPPQIMIKNTPVPANPPTTFVPAKFASFITQYSTGQVSVEIEWELQKENSKRWNPEIQYTSNYNKSVNVDFTVDTNGVYSEPRPIGTRYLTRPL

SEQ ID NO: 3581 - protein, 736 aa, Artificial Sequence
  Synthetic polypeptide
  MOD_RES (168)..(168): Any naturally occurring amino acid
  MOD_RES (204)..(204): Any naturally occurring amino acid
  MOD_RES (266)..(266): Any naturally occurring amino acid
  MOD_RES (311)..(311): Any naturally occurring amino acid
  MOD_RES (411)..(411): Any naturally occurring amino acid
  MOD_RES (460)..(460): Any naturally occurring amino acid
  MOD_RES (493)..(493): Any naturally occurring amino acid
  MOD_RES (562)..(562): Any naturally occurring amino acid
  MOD_RES (576)..(576): Any naturally occurring amino acid
  MOD_RES (587)..(587): Any naturally occurring amino acid
  MOD_RES (609)..(609): Any naturally occurring amino acid
MAADGYLPDWLEDNLSEGIREWWDLKPGAPKPKANQQKQDDGRGLVLPGYKYLGPFNGLDKGEPVNAADAAALEHDKAYDQQLKAGDNPYLRYNHADAEFQERLQEDTSFGGNLGRAVFQAKKRVLEPLGLVEEGAKTAPGKKRPVEQSPQEPDSSSGIGKKGQQPAXKRLNFGQTGDSESVPDPQPLGEPPAAPSGVGSNTMXAGGGAPMADNNEGADGVGNASGNWHCDSTWLGDRVITTSTRTWALPTYNNHLYKQISSQSGXSTNDNTYFGYSTPWGYFDFNRFHCHFSPRDWQRLINNNWGFRPKXLNFKLFNIQVKEVTTNDGTTTIANNLTSTVQVFTDSEYQLPYVLGSAHQGCLPPFPADVFMIPQYGYLTLNNGSQAVGRSSFYCLEYFPSQMLRTGNNFXFSYTFEDVPFHSSYAHSQSLDRLMNPLIDQYLYYLSRTQTTSGTAGNRXLQFSQAGPSSMANQAKNWLPGPCYRQQRVSKTXNQNNNSNFAWTGATKYHLNGRDSLVNPGPAMATHKDDEDKFFPMSGVLIFGKQGAGNSNVDLDNVMITXEEEIKTTNPVATEXYGTVATNLQSXNTAPATGTVNSQGALPGMVWQXRDVYLQGPIWAKIPHTDGHFHPSPLMGGFGLKHPPPQILIKNTPVPANPPTTFSPAKFASFITQYSTGQVSVEIEWELQKENSKRWNPEIQYTSNYNKSTNVDFAVDTNGVYSEPRPIGTRYLTRNL

SEQ ID NO: 3582 - DNA, 2208 bp, Artificial Sequence
  Synthetic polynucleotide
  modified_base (502)..(504): a, c, g, or t
  misc_feature (502)..(504): n is a, c, g, or t
  modified_base (610)..(612): a, c, g, or t
  misc_feature (610)..(612): n is a, c, g, or t
  modified_base (796)..(798): a, c, g, or t
  misc_feature (796)..(798): n is a, c, g, or t
  modified_base (931)..(933): a, c, g, or t
  misc_feature (931)..(933): n is a, c, g, or t
  modified_base (1231)..(1233): a, c, g, or t
  misc_feature (1231)..(1233): n is a, c, g, or t
  modified_base (1378)..(1380): a, c, g, or t
  misc_feature (1378)..(1380): n is a, c, g, or t
  modified_base (1477)..(1479): a, c, g, or t
  misc_feature (1477)..(1479): n is a, c, g, or t
  modified_base (1684)..(1686): a, c, g, or t
  misc_feature (1684)..(1686): n is a, c, g, or t
  modified_base (1726)..(1728): a, c, g, or t
  misc_feature (1726)..(1728): n is a, c, g, or t
  modified_base (1759)..(1761): a, c, g, or t
  misc_feature (1759)..(1761): n is a, c, g, or t
  modified_base (1825)..(1827): a, c, g, or t
  misc_feature (1825)..(1827): n is a, c, g, or t
atggctgccgatggttatcttccagattggctcgaggacaacctctctgagggcattcgcgagtggtgggacttgaaacctggagccccgaaacccaaagccaaccagcaaaagcaggacgacggccggggtctggtgcttcctggctacaagtacctcggacccttcaacggactcgacaagggggagcccgtcaacgcggcggacgcagcggccctcgagcacgacaaggcctacgaccagcagctcaaagcgggtgacaatccgtacctgcggtataaccacgccgacgccgagtttcaggagcgtctgcaagaagatacgtcttttgggggcaacctcgggcgagcagtcttccaggccaagaagcgggttctcgaacctctcggtctggttgaggaaggcgctaagacggctcctggaaagaagagaccggtagagcaatcaccccaggaaccagactcctcttcgggcatcggcaagaaaggccagcagcccgcgnnnaagagactcaactttgggcagacaggcgactcagagtcagtgcccgaccctcaaccactcggagaaccccccgcagccccctctggtgtgggatctaatacaatgnnngcaggcggtggcgctccaatggcagacaataacgaaggcgccgacggagtgggtaacgcctcaggaaattggcattgcgattccacatggctgggcgacagagtcatcaccaccagcacccgaacctgggccctccccacctacaacaaccacctctacaagcaaatctccagccaatcgggannnagcaccaacgacaacacctacttcggctacagcaccccctgggggtattttgactttaacagattccactgccacttctcaccacgtgactggcagcgactcatcaacaacaactggggattccggcccaagnnnctcaacttcaagctcttcaacatccaggtcaaggaggtcacgacgaatgatggcaccacgaccatcgccaataaccttaccagcacggttcaggtctttacggactcggaataccagctcccgtacgtcctcggctctgcgcaccagggctgcctgcctccgttcccggcggacgtcttcatgattcctcagtacgggtacctgactctgaacaatggcagtcaggccgtgggccgttcctccttctactgcctggagtactttccttctcaaatgctgagaacgggcaacaactttnnnttcagctacacgtttgaggacgtgccttttcacagcagctacgcgcacagccaaagcctggaccggctgatgaaccccctcatcgaccagtacctgtactacctgtctcggactcagaccacgagtggtaccgcaggaaatcggnnnttgcaattttctcaggccgggcctagtagcatggcgaatcaggccaaaaactggctacccgggccctgctaccggcagcaacgcgtctccaagacannnaatcaaaataacaacagcaactttgcctggaccggtgccaccaagtatcatctgaatggcagagactctctggtaaatcccggtcccgctatggcaacccacaaggacgacgaagacaaattttttccgatgagcggagtcttaatatttgggaaacagggagctggaaatagcaacgtggaccttgacaacgttatgataaccnnngaggaagaaattaaaaccaccaacccagtggccacagaannntacggcacggtggccactaacctgcaatcgnnnaacaccgctcctgctacagggaccgtcaacagtcaaggagccttacctggcatggtctggcagnnncgggacgtgtacctgcagggtcctatctgggccaagattcctcacacggacggacactttcatccctcgccgctgatgggaggctttggactgaaacacccgcctcctcagatcctgattaagaatacacctgttcccgcgaatcctccaactaccttcagtccagctaagtttgcgtcgttcatcacgcagtacagcaccggacaggtcagcgtggaaattgaatgggagctgcagaaagaaaacagcaaacgctggaacccagagattcaatacacttccaactacaacaaatctacaaatgtggactttgctgttgacacaaatggcgtttattctgagcctcgccccatcggcacccgttacctcacccgtaatctg

SEQ ID NO: 3583 - protein, 737 aa, Artificial Sequence
  Synthetic polypeptide
  MOD_RES (157)..(157): Any naturally occurring amino acid
  MOD_RES (168)..(168): Any naturally occurring amino acid
  MOD_RES (262)..(263): Any naturally occurring amino acid
  MOD_RES (312)..(312): Any naturally occurring amino acid
  MOD_RES (412)..(412): Any naturally occurring amino acid
  MOD_RES (460)..(461): Any naturally occurring amino acid
  MOD_RES (552)..(552): Any naturally occurring amino acid
  MOD_RES (556)..(557): Any naturally occurring amino acid
  MOD_RES (563)..(563): Any naturally occurring amino acid
  MOD_RES (580)..(580): Any naturally occurring amino acid
  MOD_RES (588)..(588): Any naturally occurring amino acid
  MOD_RES (664)..(664): Any naturally occurring amino acid
MAADGYLPDWLEDNLSEGIREWWDLKPGAPKPKANQQKQDDGRGLVLPGYKYLGPFNGLDKGEPVNAADAAALEHDKAYDQQLKAGDNPYLRYNHADAEFQERLQEDTSFGGNLGRAVFQAKKRVLEPLGLVEEGAKTAPGKKRPVEQSPQEPDSSXGIGKKGQQPAXKRLNFGQTGDSESVPDPQPLGEPPAAPSGVGSNTMAAGGGAPMADNNEGADGVGNASGNWHCDSTWLGDRVITTSTRTWALPTYNNHLYKQISXXQSGGSTNDNTYFGYSTPWGYFDFNRFHCHFSPRDWQRLINNNWGFRPKXLNFKLFNIQVKEVTTNDGTTTIANNLTSTVQVFTDSEYQLPYVLGSAHQGCLPPFPADVFMIPQYGYLTLNNGSQAVGRSSFYCLEYFPSQMLRTGNNFXFSYTFEDVPFHSSYAHSQSLDRLMNPLIDQYLYYLSRTQTTGGTAGNXXLQFSQAGPSSMANQAKNWLPGPCYRQQRVSKTTNQNNNSNFAWTGATKYHLNGRDSLVNPGVAMATHKDDEDRFFPSSGVLIFGKQGAGNXNVDXXNVMITXEEEIKTTNPVATEEYGXVATNLQSXNTAPQTGTVNSQGALPGMVWQNRDVYLQGPIWAKIPHTDGNFHPSPLMGGFGLKHPPPQILIKNTPVPANPPTTFXPAKFASFITQYSTGQVSVEIEWELQKENSKRWNPEIQYTSNYNKSTNVDFAVDTEGVYSEPRPIGTRYLTRNL

SEQ ID NO: 3584 - DNA, 2211 bp, Artificial Sequence
  Synthetic polynucleotide
  modified_base (469)..(471): a, c, g, or t
  misc_feature (469)..(471): n is a, c, g, or t
  modified_base (502)..(504): a, c, g, or t
  misc_feature (502)..(504): n is a, c, g, or t
  modified_base (784)..(789): a, c, g, or t
  misc_feature (784)..(789): n is a, c, g, or t
  modified_base (934)..(936): a, c, g, or t
  misc_feature (934)..(936): n is a, c, g, or t
  modified_base (1234)..(1236): a, c, g, or t
  misc_feature (1234)..(1236): n is a, c, g, or t
  modified_base (1378)..(1383): a, c, g, or t
  misc_feature (1378)..(1383): n is a, c, g, or t
  modified_base (1654)..(1656): a, c, g, or t
  misc_feature (1654)..(1656): n is a, c, g, or t
  modified_base (1666)..(1671): a, c, g, or t
  misc_feature (1666)..(1671): n is a, c, g, or t
  modified_base (1687)..(1689): a, c, g, or t
  misc_feature (1687)..(1689): n is a, c, g, or t
  modified_base (1738)..(1740): a, c, g, or t
  misc_feature (1738)..(1740): n is a, c, g, or t
  modified_base (1762)..(1764): a, c, g, or t
  misc_feature (1762)..(1764): n is a, c, g, or t
  modified_base (1990)..(1992): a, c, g, or t
  misc_feature (1990)..(1992): n is a, c, g, or t
atggctgccgatggttatcttccagattggctcgaggacaacctctctgagggcattcgcgagtggtgggacttgaaacctggagccccgaaacccaaagccaaccagcaaaagcaggacgacggccggggtctggtgcttcctggctacaagtacctcggacccttcaacggactcgacaagggggagcccgtcaacgcggcggacgcagcggccctcgagcacgacaaggcctacgaccagcagctcaaagcgggtgacaatccgtacctgcggtataaccacgccgacgccgagtttcaggagcgtctgcaagaagatacgtcttttgggggcaacctcgggcgagcagtcttccaggccaagaagcgggttctcgaacctctcggtctggttgaggaaggcgctaagacggctcctggaaagaagagaccggtagagcaatcaccccaggaaccagactcctctnnnggcatcggcaagaaaggccagcagcccgcgnnnaagagactcaactttgggcagactggcgactcagagtcagtgcccgaccctcaaccactcggagaaccccccgcagccccctctggtgtgggatctaatacaatggctgcaggcggtggcgctccaatggcagacaataacgaaggcgccgacggagtgggtaatgcctcaggaaattggcattgcgattccacatggctgggcgacagagtcatcaccaccagcacccgaacctgggccctccccacctacaacaaccacctctacaagcaaatctccnnnnnncaatcgggaggaagcaccaacgacaacacctacttcggctacagcaccccctgggggtattttgactttaacagattccactgccacttctcaccacgtgactggcagcgactcatcaacaacaactggggattccggcccaagnnnctcaacttcaagctcttcaacatccaggtcaaggaggtcacgacgaatgatggcaccacgaccatcgccaataaccttaccagcacggttcaggtctttacggactcggaataccagctcccgtacgtcctcggctctgcgcaccagggctgcctgcctccgttcccggcggacgtcttcatgattcctcagtacgggtacctgactctgaacaatggcagtcaggccgtgggccgttcctccttctactgcctggagtactttccttctcaaatgctgagaacgggcaacaactttnnnttcagctacacgtttgaggacgtgccttttcacagcagctacgcgcacagccaaagcctggaccggctgatgaaccccctcatcgaccagtacctgtactacctgtctcggactcagaccacgggaggtaccgcaggaaatnnnnnnttgcaattttctcaggccgggcctagtagcatggcgaatcaggccaaaaactggctacccgggccctgctaccggcagcaacgcgtctccaagacaacgaatcaaaataacaacagcaactttgcctggaccggtgccaccaagtatcatctgaatggcagagactctctggtaaatcccggtgtcgctatggcaacccacaaggacgacgaagaccgattttttccgtccagcggagtcttaatatttgggaaacagggagctggaaatnnnaacgtggacnnnnnnaacgttatgataaccnnngaggaagaaattaaaaccaccaacccagtggccacagaagagtacggcnnngtggccactaacctgcaatcgnnnaacaccgctcctcaaacagggaccgtcaacagtcaaggagccttacctggcatggtctggcagaaccgggacgtgtacctgcagggtcctatctgggccaagattcctcacacggacggaaactttcatccctcgccgctgatgggaggctttggactgaaacacccgcctcctcagatcctgattaagaatacacctgttcccgcgaatcctccaactaccttcnnnccagctaagtttgcgtcgttcatcacgcagtacagcaccggacaggtcagcgtggaaattgaatgggagctgcagaaagaaaacagcaaacgctggaacccagagattcaatacacttccaactacaacaaatctacaaatgtggactttgctgttgacacagaaggcgtttattctgagcctcgccccatcggcacccgttacctcacccgtaatctg

SEQ ID NO: 3585 - protein, 738 aa, Artificial Sequence
  Synthetic polypeptide
  MOD_RES (158)..(158): Any naturally occurring amino acid
  MOD_RES (169)..(169): Any naturally occurring amino acid
  MOD_RES (564)..(564): Any naturally occurring amino acid
MAADGYLPDWLEDNLSEGIREWWDLKPGAPKPKANQQKQDDGRGLVLPGYKYLGPFNGLDKGEPVNAADAAALEHDKAYDQQLKAGDNPYLRYNHADAEFQERLQEDTSFGGNLGRAVFQAKKRVLEPLGLVEEGAKTAPGKKRPVEQSPQREPDSSXGIGKKGQQPAXKRLNFGQTGDSESVPDPQPLGEPPAAPSGVGSNTMAAGGGAPMADNNEGADGVGNSSGNWHCDSTWLGDRVITTSTRTWALPTYNNHLYKQISNGTSGGSTNDNTYFGYSTPWGYFDFNRFHCHFSPRDWQRLINNNWGFRPKRLNFKLFNIQVKEVTTNEGTKTIANNLTSTVQVFTDSEYQLPYVLGSAHQGCLPPFPADVFMIPQYGYLTLNNGSQAVGRSSFYCLEYFPSQMLRTGNNFQFSYTFEDVPFHSSYAHSQSLDRLMNPLIDQYLYYLSRTQTTGGTAGTQTLQFSQAGPSSMANQAKNWLPGPCYRQQRVSTTTNQNNNSNFAWTGATKYHLNGRDSLVNPGVAMATHKDDEDRFFPSSGVLIFGKQGAGNDNVDYSNVMITXEEEIKTTNPVATEEYGVVATNLQSANTAPQTGTVNSQGALPGMVWQNRDVYLQGPIWAKIPHTDGNFHPSPLMGGFGLKHPPPQILIKNTPVPADPPTTFNQAKLNSFITQYSTGQVSVEIEWELQKENSKRWNPEIQYTSNYYKSTNVDFAVNTEGVYSEPRPIGTRYLTRNL

SEQ ID NO: 3586 - DNA, 2214 bp, Artificial Sequence
  Synthetic polynucleotide
  modified_base (472)..(474): a, c, g, or t
  misc_feature (472)..(474): n is a, c, g, or t
  modified_base (505)..(507): a, c, g, or t
  misc_feature (505)..(507): n is a, c, g, or t
  modified_base (1690)..(1692): a, c, g, or t
  misc_feature (1690)..(1692): n is a, c, g, or t
atggctgccgatggttatcttccagattggctcgaggacaacctctctgagggcattcgcgagtggtgggacctgaaacctggagccccgaaacccaaagccaaccagcaaaagcaggacgacggccggggtctggtgcttcctggctacaagtacctcggacccttcaacggactcgacaagggggagcccgtcaacgcggcggacgcagcggccctcgagcacgacaaggcctacgaccagcagctcaaagcgggtgacaatccgtacctgcggtataatcacgccgacgccgagtttcaggagcgtctgcaagaagatacgtcttttgggggcaacctcgggcgagcagtcttccaggccaagaagcgggttctcgaacctctcggtctggttgaggaaggcgctaagacggctcctggaaagaagagaccggtagagcagtcaccacagcgtgagcccgactcctccnnnggcatcggcaagaaaggccagcagcccgccnnnaagagactcaatttcggtcagactggcgactcagagtcagtccccgaccctcaacctctcggagaacctccagcagcgccctctggtgtgggatctaatacaatggctgcaggcggtggcgcaccaatggcagacaataacgaaggtgccgacggagtgggtaattcctcgggaaattggcattgcgattccacatggctgggcgacagagtcatcaccaccagcacccgaacctgggccctgcccacctacaacaaccacctctacaagcaaatctccaacgggacctcgggaggcagcaccaacgacaacacctactttggctacagcaccccctgggggtattttgactttaacagattccactgccacttctcaccacgtgactggcagcgactcatcaacaacaactggggattccggcccaagagactcaacttcaagctcttcaacatccaggtcaaagaggtcacgacgaatgaaggcaccaagaccatcgccaataacctcaccagcaccgtccaggtgtttacggactcggaataccagctgccgtacgtcctcggctctgcccaccagggctgcctgcctccgttcccggcggacgtcttcatgattcctcagtacggctacctgactctcaacaacggtagtcaggccgtgggacgttcctccttctactgcctggagtacttcccctctcagatgctgagaacgggcaacaactttcaattcagctacactttcgaggacgtgcctttccacagcagctacgcgcacagccagagtttggacaggctgatgaatcctctcatcgaccagtacctgtactacctgtcaagaacccagactacgggaggcacagcgggaacccagacgttgcagttttctcaggccgggcctagcagcatggcgaatcaggccaaaaactggctgcctggaccctgctacagacagcagcgcgtctccacgacaacgaatcaaaacaacaacagcaactttgcctggactggtgccaccaagtatcatctgaacggcagagactctctggtgaatccgggcgtcgccatggcaacccacaaggacgacgaggaccgcttcttcccatccagcggcgtcctcatatttggcaagcagggagctggaaatgacaacgtggactatagcaacgtgatgataaccnnngaggaagaaatcaagaccaccaaccccgtggccacagaagagtatggcgtggtggctactaacctacagtcggcaaacaccgctcctcaaacggggaccgtcaacagccagggagccttacctggcatggtctggcagaaccgggacgtgtacctgcagggtcctatttgggccaagattcctcacacagatggcaactttcacccgtctcctttaatgggcggctttggacttaaacatccgcctcctcagatcctcatcaaaaacactcctgttcctgcggatcctccaacaacgttcaaccaggccaagctgaattctttcatcacgcagtacagcaccggacaagtcagcgtggagatcgagtgggagctgcagaaggagaacagcaagcgctggaacccagagattcagtatacttccaactactacaaatctacaaatgtggactttgctgttaatactgagggtgtttactctgagcctcgccccattggcactcgttacctcacccgtaatctg

SEQ ID NO: 3587 - protein, 738 aa, Artificial Sequence
  Synthetic polypeptide
  MOD_RES (158)..(158): Any naturally occurring amino acid
  MOD_RES (169)..(169): Any naturally occurring amino acid
  MOD_RES (315)..(315): Any naturally occurring amino acid
  MOD_RES (413)..(413): Any naturally occurring amino acid
  MOD_RES (472)..(472): Any naturally occurring amino acid
  MOD_RES (534)..(534): Any naturally occurring amino acid
  MOD_RES (542)..(542): Any naturally occurring amino acid
  MOD_RES (595)..(595): Any naturally occurring amino acid
MAADGYLPDWLEDNLSEGIREWWDLKPGAPKPKANQQKQDDGRGLVLPGYKYLGPFNGLDKGEPVNAADAAALEHDKAYDQQLKAGDNPYLRYNHADAEFQERLQEDTSFGGNLGRAVFQAKKRVLEPLGLVEEGAKTAPGKKRPVEQSPQREPDSSXGIGKKGQQPAXKRLNFGQTGDSESVPDPQPLGEPPAAPSGVGSNTMAAGGGAPMADNNEGADGVGSSSGNWHCDSTWLGDRVITTSTRTWALPTYNNHLYKQISNGTSGGSTNDNTYFGYSTPWGYFDFNRFHCHFSPRDWQRLINNNWGFRPKRLXFKLFNIQVKEVTQNEGTKTIANNLTSTIQVFTDSEYQLPYVLGSAHQGCLPPFPADVFMIPQYGYLTLNNGSQAVGRSSFYCLEYFPSQMLRTGNNFXFSYTFEDVPFHSSYAHSQSLDRLMNPLIDQYLYYLSRTQTTGGTAGTQTLQFSQAGPSXMANQAKNWLPGPCYRQQRVSTTTSQNNNSNFAWTGATKYHLNGRDSLVNPGVAMATHKDDEXRFFPSSGXLIFGKQGAGKDNVDYSNVMLTSEEEIKTTNPVATEEYGVVADNLQQQNTAPQXGTVNSQGALPGMVWQNRDVYLQGPIWAKIPHTDGNFHPSPLMGGFGLKHPPPQILIKNTPVPADPPTTFNQAKLNSFITQYSTGQVSVEIEWELQKENSKRWNPEIQYTSNYYKSTNVDFAVNTEGVYSEPRPIGTRYLTRNL

SEQ ID NO: 3588 - DNA, 2214 bp, Artificial Sequence
  Synthetic polynucleotide
  modified_base (472)..(474): a, c, g, or t
  misc_feature (472)..(474): n is a, c, g, or t
  modified_base (505)..(507): a, c, g, or t
  misc_feature (505)..(507): n is a, c, g, or t
  modified_base (943)..(945): a, c, g, or t
  misc_feature (943)..(945): n is a, c, g, or t
  modified_base (1237)..(1239): a, c, g, or t
  misc_feature (1237)..(1239): n is a, c, g, or t
  modified_base (1414)..(1416): a, c, g, or t
  misc_feature (1414)..(1416): n is a, c, g, or t
  modified_base (1600)..(1602): a, c, g, or t
  misc_feature (1600)..(1602): n is a, c, g, or t
  modified_base (1624)..(1626): a, c, g, or t
  misc_feature (1624)..(1626): n is a, c, g, or t
  modified_base (1783)..(1785): a, c, g, or t
  misc_feature (1783)..(1785): n is a, c, g, or t
atggctgccgatggttatcttccagattggctcgaggacaacctctctgagggcattcgcgagtggtgggacctgaaacctggagccccgaaacccaaagccaaccagcaaaagcaggacgacggccggggtctggtgcttcctggctacaagtacctcggacccttcaacggactcgacaagggggagcccgtcaacgcggcggacgcagcggccctcgagcacgacaaggcctacgaccagcagctcaaagcgggtgacaatccgtacctgcggtataatcacgccgacgccgagtttcaggagcgtctgcaagaagatacgtcttttgggggcaacctcgggcgagcagtcttccaggccaagaagcgggttctcgaacctctcggtctggttgaggaaggcgctaagacggctcctggaaagaagagaccggtagagcagtcaccacagcgtgagcccgactcctccnnnggcatcggcaagaaaggccagcagcccgccnnnaagagactcaatttcggtcagactggcgactcagagtcagtccccgaccctcaacctctcggagaacctccagcagcgccctctggtgtgggatctaatacaatggctgcaggcggtggcgcaccaatggcagacaataacgaaggtgccgacggagtgggtagttcctcgggaaattggcattgcgattccacatggctgggcgacagagtcatcaccaccagcacccgaacctgggccctgcccacctacaacaaccacctctacaagcaaatctccaacgggacctcgggaggcagcaccaacgacaacacctactttggctacagcaccccctgggggtattttgactttaacagattccactgccacttctcaccacgtgactggcagcgactcatcaacaacaactggggattccggcccaagagactcnnnttcaagctcttcaacatccaggtcaaagaggtcacgcagaatgaaggcaccaagaccatcgccaataacctcaccagcaccatccaggtgtttacggactcggaataccagctgccgtacgtcctcggctctgcccaccagggctgcctgcctccgttcccggcggacgtcttcatgattcctcagtacggctacctgactctcaacaacggtagtcaggccgtgggacgttcctccttctactgcctggagtacttcccctctcagatgctgagaacgggcaacaactttnnnttcagctacactttcgaggacgtgcctttccacagcagctacgcgcacagccagagtttggacaggctgatgaatcctctcatcgaccagtacctgtactacctgtcaagaacccagactacgggaggcacagcgggaacccagacgttgcagttttctcaggccgggcctagcnnnatggcgaatcaggccaaaaactggctgcctggaccctgctacagacagcagcgcgtctccacgacaacgtcgcaaaacaacaacagcaactttgcctggactggtgccaccaagtatcatctgaacggcagagactctctggtgaatccgggcgtcgccatggcaacccacaaggacgacgagnnncgcttcttcccatccagcggcnnnctcatatttggcaagcagggagctggaaaagacaacgtggactatagcaacgtgatgctaaccagcgaggaagaaatcaagaccaccaaccccgtggccacagaagagtatggcgtggtggctgataacctacagcagcaaaacaccgctcctcaannngggaccgtcaacagccagggagccttacctggcatggtctggcagaaccgggacgtgtacctgcagggtcctatttgggccaagattcctcacacagatggcaactttcacccgtctcctttaatgggcggctttggacttaaacatccgcctcctcagatcctcatcaaaaacactcctgttcctgcggatcctccaacaacgttcaaccaggccaagctgaattctttcatcacgcagtacagcaccggacaagtcagcgtggagatcgagtgggagctgcagaaggagaacagcaagcgctggaacccagagattcagtatacttccaactactacaaatctacaaatgtggactttgctgttaatactgagggtgtttactctgagcctcgccccattggcactcgttacctcacccgtaatctg

SEQ ID NO: 3589 - protein, 738 aa, Artificial Sequence
  Synthetic polypeptide
  MOD_RES (169)..(169): Any naturally occurring amino acid
  MOD_RES (315)..(315): Any naturally occurring amino acid
  MOD_RES (534)..(534): Any naturally occurring amino acid
  MOD_RES (542)..(542): Any naturally occurring amino acid
MAADGYLPDWLEDNLSEGIREWWDLKPGAPKPKANQQKQDDGRGLVLPGYKYLGPFNGLDKGEPVNAADAAALEHDKAYDQQLKAGDNPYLRYNHADAEFQERLQEDTSFGGNLGRAVFQAKKRVLEPLGLVEEGAKTAPGKKRPVEPSPQRSPDSSTGIGKKGQQPAXKRLNFGQTGDSESVPDPQPIGEPPAAPSGVGSGTMAAGGGAPMADNNEGADGVGSSSGNWHCDSTWLGDRVITTSTRTWALPTYNNHLYKQISNGTSGGSTNDNTYFGYSTPWGYFDFNRFHCHFSPRDWQRLINNNWGFRPKRLXFKLFNIQVKEVTQNEGTKTIANNLTSTIQVFTDSEYQLPYVLGSAHQGCLPPFPADVFMIPQYGYLTLNNGSQAVGRSSFYCLEYFPSQMLRTGNNFEFSYTFEDVPFHSSYAHSQSLDRLMNPLIDQYLYYLSRTQSTGGTAGTQQLLFSQAGPSNMSAQAKNWLPGPCYRQQRVSTTLSQNNNSNFAWTGATKYHLNGRDSLVNPGVAMATHKDDEXRFFPSSGXLMFGKQGAGKDNVDYSNVMLTSEEEIKTTNPVATEQYGVVADNLQQQNTAPIVGAVNSQGALPGMVWQNRDVYLQGPIWAKIPHTDGNFHPSPLMGGFGLKHPPPQILIKNTPVPADPPTTFNQAKLNSFITQYSTGQVSVEIEWELQKENSKRWNPEIQYTSNYYKSTNVDFAVNTEGVYSEPRPIGTRYLTRNL

SEQ ID NO: 3590 - DNA, 2214 bp, Artificial Sequence
  Synthetic polynucleotide
  modified_base (505)..(507): a, c, g, or t
  misc_feature (505)..(507): n is a, c, g, or t
  modified_base (943)..(945): a, c, g, or t
  misc_feature (943)..(945): n is a, c, g, or t
  modified_base (1600)..(1602): a, c, g, or t
  misc_feature (1600)..(1602): n is a, c, g, or t
  modified_base (1624)..(1626): a, c, g, or t
  misc_feature (1624)..(1626): n is a, c, g, or t
atggctgccgatggttatcttccagattggctcgaggacaacctctctgagggcattcgcgagtggtgggacctgaaacctggagccccgaaacccaaagccaaccagcaaaagcaggacgacggccggggtctggtgcttcctggctacaagtacctcggacccttcaacggactcgacaagggggagcccgtcaacgcggcggacgcagcggccctcgagcacgacaaggcctacgaccagcagctcaaagcgggtgacaatccgtacctgcggtataatcacgccgacgccgagtttcaggagcgtctgcaagaagatacgtcttttgggggcaacctcgggcgagcagtcttccaggccaagaagcgggttctcgaacctctcggtctggttgaggaaggcgctaagacggctcctggaaagaagagaccggtagagccgtcaccacagcgttcccccgactcctccacgggcatcggcaagaaaggccagcagcccgccnnnaagagactcaatttcggtcagactggcgactcagagtcagtccccgaccctcaacctatcggagaacctccagcagcgccctctggtgtgggatctggtacaatggctgcaggcggtggcgcaccaatggcagacaataacgaaggtgccgacggagtgggtagttcctcgggaaattggcattgcgattccacatggctgggcgacagagtcatcaccaccagcacccgaacctgggccctgcccacctacaacaaccacctctacaagcaaatctccaacgggacctcgggaggcagcaccaacgacaacacctactttggctacagcaccccctgggggtattttgactttaacagattccactgccacttctcaccacgtgactggcagcgactcatcaacaacaactggggattccggcccaagagactcnnnttcaagctcttcaacatccaggtcaaagaggtcacgcagaatgaaggcaccaagaccatcgccaataacctcaccagcaccatccaggtgtttacggactcggaataccagctgccgtacgtcctcggctctgcccaccagggctgcctgcctccgttcccggcggacgtcttcatgattcctcagtacggctacctgactctcaacaacggtagtcaggccgtgggacgttcctccttctactgcctggagtacttcccctctcagatgctgagaacgggcaacaactttgagttcagctacactttcgaggacgtgcctttccacagcagctacgcgcacagccagagtttggacaggctgatgaatcctctcatcgaccagtacctgtactacctgtcaagaacccagtctacgggaggcacagcgggaacccagcagttgctgttttctcaggccgggcctagcaacatgtcggctcaggccaaaaactggctgcctggaccctgctacagacagcagcgcgtctccacgacactgtcgcaaaacaacaacagcaactttgcctggactggtgccaccaagtatcatctgaacggcagagactctctggtgaatccgggcgtcgccatggcaacccacaaggacgacgagnnncgcttcttcccatccagcggcnnnctcatgtttggcaagcagggagctggaaaagacaacgtggactatagcaacgtgatgctaaccagcgaggaagaaatcaagaccaccaaccccgtggccacagaacagtatggcgtggtggctgataacctacagcagcaaaacaccgctcctattgtgggggccgtcaacagccagggagccttacctggcatggtctggcagaaccgggacgtgtacctgcagggtcctatttgggccaagattcctcacacagatggcaactttcacccgtctcctttaatgggcggctttggacttaaacatccgcctcctcagatcctcatcaaaaacactcctgttcctgcggatcctccaacaacgttcaaccaggccaagctgaattctttcatcacgcagtacagcaccggacaagtcagcgtggagatcgagtgggagctgcagaaggagaacagcaagcgctggaacccagagattcagtatacttccaactactacaaatctacaaatgtggactttgctgttaatactgagggtgtttactctgagcctcgccccattggcactcgttacctcacccgtaatctg

SEQ ID NO: 3591 - protein, 738 aa, Artificial Sequence
  Synthetic polypeptide
  MOD_RES (471)..(471): Any naturally occurring amino acid
MAADGYLPDWLEDNLSEGIREWWDLKPGAPKPKANQQKQDDGRGLVLPGYKYLGPFNGLDKGEPVNAADAAALEHDKAYDQQLKAGDNPYLRYNHADAEFQERLQEDTSFGGNLGRAVFQAKKRVLEPLGLVEEGAKTAPGKKRPVEPSPQRSPDSSTGIGKKGQQPAKKRLNFGQTGDSESVPDPQPIGEPPAGPSGLGSGTMAAGGGAPMADNNEGADGVGSSSGNWHCDSTWLGDRVITTSTRTWALPTYNNHLYKQISNGTSGGSTNDNTYFGYSTPWGYFDFNRFHCHFSPRDWQRLINNNWGFRPKRLNFKLFNIQVKEVTQNEGTKTIANNLTSTIQVFTDSEYQLPYVLGSAHQGCLPPFPADVFMIPQYGYLTLNNGSQAVGRSSFYCLEYFPSQMLRTGNNFEFSYTFEDVPFHSSYAHSQSLDRLMNPLIDQYLYYLSRTQSTGGTAGTQQLLFSQAGPXNMSAQAKNWLPGPCYRQQRVSTTLSQNNNSNFAWTGATKYHLNGRDSLVNPGVAMATHKDDEERFFPSSGVLMFGKQGAGKDNVDYSSVMLTSEEEIKTTNPVATEQYGVVADNLQQQNTAPIVGAVNSQGALPGMVWQNRDVYLQGPIWAKIPHTDGNFHPSPLMGGFGLKHPPPQILIKNTPVPADPPTTFSQAKLASFITQYSTGQVSVEIEWELQKENSKRWNPEIQYTSNYYKSTNVDFAVNTEGTYSEPRPIGTRYLTRNL

SEQ ID NO: 3592 - DNA, 2214 bp, Artificial Sequence
  Synthetic polynucleotide
  modified_base (1411)..(1413): a, c, g, or t
  misc_feature (1411)..(1413): n is a, c, g, or t
atggctgccgatggttatcttccagattggctcgaggacaacctctctgagggcattcgcgagtggtgggacttgaaacctggagccccgaaacccaaagccaaccagcaaaagcaggacgacggccggggtctggtgcttcctggctacaagtacctcggacccttcaacggactcgacaagggggagcccgtcaacgcggcggacgcagcggccctcgagcacgacaaggcctacgaccagcagctcaaagcgggtgacaatccgtacctgcggtataaccacgccgacgccgagtttcaggagcgtctgcaagaagatacgtcttttgggggcaacctcgggcgagcagtcttccaggccaagaagcgggttctcgaacctctcggtctggttgaggaaggcgctaagacggctcctggaaagaagagaccggtagagccatcaccccagcgttctccagactcctctacgggcatcggcaagaaaggccagcagcccgcgaaaaagagactcaactttgggcagactggcgactcagagtcagtgcccgaccctcaaccaatcggagaaccccccgcaggcccctctggtctgggatctggtacaatggctgcaggcggtggcgctccaatggcagacaataacgaaggcgccgacggagtgggtagttcctcaggaaattggcattgcgattccacatggctgggcgacagagtcatcaccaccagcacccgaacctgggccctccccacctacaacaaccacctctacaagcaaatctccaacgggacttcgggaggaagcaccaacgacaacacctacttcggctacagcaccccctgggggtattttgactttaacagattccactgccacttctcaccacgtgactggcagcgactcatcaacaacaactggggattccggcccaagagactcaacttcaagctcttcaacatccaggtcaaggaggtcacgcagaatgaaggcaccaagaccatcgccaataaccttaccagcacgattcaggtctttacggactcggaataccagctcccgtacgtcctcggctctgcgcaccagggctgcctgcctccgttcccggcggacgtcttcatgattcctcagtacgggtacctgactctgaacaatggcagtcaggccgtgggccgttcctccttctactgcctggagtactttccttctcaaatgctgagaacgggcaacaactttgagttcagctacacgtttgaggacgtgccttttcacagcagctacgcgcacagccaaagcctggaccggctgatgaaccccctcatcgaccagtacctgtactacctgtctcggactcagtccacgggaggtaccgcaggaactcagcagttgctattttctcaggccgggcctnnnaacatgtcggctcaggccaaaaactggctacccgggccctgctaccggcagcaacgcgtctccacgacactgtcgcaaaataacaacagcaactttgcctggaccggtgccaccaagtatcatctgaatggcagagactctctggtaaatcccggtgtcgctatggcaacccacaaggacgacgaagagcgattttttccgtccagcggagtcttaatgtttgggaaacagggagctggaaaagacaacgtggactatagcagcgttatgctaaccagtgaggaagaaattaaaaccaccaacccagtggccacagaacagtacggcgtggtggccgataacctgcaacagcaaaacaccgctcctattgtaggggccgtcaacagtcaaggagccttacctggcatggtctggcagaaccgggacgtgtacctgcagggtcctatctgggccaagattcctcacacggacggaaactttcatccctcgccgctgatgggaggctttggactgaaacacccgcctcctcagatcctgattaagaatacacctgttcccgcggatcctccaactaccttcagtcaagctaagctggcgtcgttcatcacgcagtacagcaccggacaggtcagcgtggaaattgaatgggagctgcagaaagaaaacagcaaacgctggaacccagagattcaatacacttccaactactacaaatctacaaatgtggactttgctgttaacacagaaggcacttattctgagcctcgccccatcggcacccgttacctcacccgtaatctg

SEQ ID NO: 3593 - protein, 737 aa, Artificial Sequence
  Synthetic polypeptide
  MOD_RES (148)..(148): Any naturally occurring amino acid
  MOD_RES (169)..(169): Any naturally occurring amino acid
  MOD_RES (314)..(314): Any naturally occurring amino acid
  MOD_RES (466)..(466): Any naturally occurring amino acid
  MOD_RES (563)..(563): Any naturally occurring amino acid
  MOD_RES (580)..(580): Any naturally occurring amino acid
  MOD_RES (588)..(588): Any naturally occurring amino acid
MAADGYLPDWLEDNLSEGIREWWDLKPGAPKPKANQQKQDDGRGLVLPGYKYLGPFNGLDKGEPVNAADAAALEHDKAYDQQLKAGDNPYLRYNHADAEFQERLQEDTSFGGNLGRAVFQAKKRVLEPLGLVEEGAKTAPGKKRPVEXSPQRSPDSSTGIGKKGQQPAXKRLNFGQTGDSESVPDPQPLGEPPAAPSGVGSGTMAAGGGAPMADNNEGADGVGNASGNWHCDSTWLGDRVITTSTRTWALPTYNNHLYKQISSQSAGSTNDNTYFGYSTPWGYFDFNRFHCHFSPRDWQRLINNNWGFRPKKLXFKLFNIQVKEVTTNDGVTTIANNLTSTVQVFSDSEYQLPYVLGSAHQGCLPPFPADVFMIPQYGYLTLNNGSQSVGRSSFYCLEYFPSQMLRTGNNFEFSYTFEDVPFHSSYAHSQSLDRLMNPLIDQYLYYLARTQSTTGGTAGNRELQFXQAGPSTMAEQAKNWLPGPCYRQQRVSKTLDQNNNSNFAWTGATKYHLNGRNSLVNPGVAMATHKDDEDRFFPSSGVLIFGKTGAANKTTLENVLMTXEEEIKTTNPVATEEYGXVSSNLQSXNTAPQTQTVNSQGALPGMVWQNRDVYLQGPIWAKIPHTDGNFHPSPLMGGFGLKHPPPQILIKNTPVPANPPEVFTPAKFASFITQYSTGQVSVEIEWELQKENSKRWNPEIQYTSNYDKSTNVDFAVDSEGVYSEPRPIGTRYLTRNL

SEQ ID NO: 3594 - DNA, 2211 bp, Artificial Sequence
  Synthetic polynucleotide
  modified_base (442)..(444): a, c, g, or t
  misc_feature (442)..(444): n is a, c, g, or t
  modified_base (505)..(507): a, c, g, or t
  misc_feature (505)..(507): n is a, c, g, or t
  modified_base (940)..(942): a, c, g, or t
  misc_feature (940)..(942): n is a, c, g, or t
  modified_base (1396)..(1398): a, c, g, or t
  misc_feature (1396)..(1398): n is a, c, g, or t
  modified_base (1687)..(1689): a, c, g, or t
  misc_feature (1687)..(1689): n is a, c, g, or t
  modified_base (1738)..(1740): a, c, g, or t
  misc_feature (1738)..(1740): n is a, c, g, or t
  modified_base (1762)..(1764): a, c, g, or t
  misc_feature (1762)..(1764): n is a, c, g, or t
atggctgccgatggttatcttccagattggctcgaggacaacctctctgagggcattcgcgagtggtgggacctgaaacctggagccccgaaacccaaagccaaccagcaaaagcaggacgacggccggggtctggtgcttcctggctacaagtacctcggacccttcaacggactcgacaagggggagcccgtcaacgcggcggacgcagcggccctcgagcacgacaaggcctacgaccagcagctcaaagcgggtgacaatccgtacctgcggtataaccacgccgacgccgagtttcaggagcgtctgcaagaagatacgtcatttgggggcaacctcgggcgagcagtcttccaggccaagaagcgggttctcgaacctctcggtctggttgaggaaggcgctaagacggctcctggaaagaagagaccggtagagnnntcacctcagcgttcccccgactcctccacgggcatcggcaagaaaggccagcagcccgccnnnaagagactcaatttcggtcagactggcgactcagagtcagtccccgaccctcaacctctcggagaacctccagcagcgccctctggtgtgggatctggtacaatggctgcaggcggtggcgcaccaatggcagacaataacgaaggtgccgacggagtgggtaatgcctcaggaaattggcattgcgattccacatggctgggcgacagagtcattaccaccagcacccgaacctgggccctgcccacctacaacaaccacctctacaagcaaatctccagtcaaagtgcaggtagtaccaacgacaacacctacttcggctacagcaccccctgggggtattttgactttaacagattccactgccacttctcaccacgtgactggcagcgactcatcaacaacaactggggattccggcccaagaagctgnnnttcaagctcttcaacatccaggtcaaggaggtcacgacgaatgacggcgttacgaccatcgctaataaccttaccagcacggttcaggtattctcggactcggaataccagctgccgtacgtcctcggctctgcgcaccagggctgcctgcctccgttcccggcggacgtcttcatgattcctcagtacggctacctgactctcaacaatggcagtcagtctgtgggacgttcctccttctactgcctggagtacttcccctctcagatgctgagaacgggcaacaactttgagttcagctacaccttcgaggacgtgcctttccacagcagctacgcacacagccagagcctggaccggctgatgaatcccctcatcgaccagtacttgtactacctggccagaacacagagtaccacaggaggcacagctggcaatcgggaactgcagtttnnncaggccgggccttcaactatggccgaacaagccaagaattggttacctggaccttgctaccggcaacaaagagtctccaaaacgctggatcaaaacaacaacagcaactttgcttggactggtgccaccaaatatcacctgaacggcagaaactcgttggttaatcccggcgtcgccatggcaactcacaaggacgacgaggaccgctttttcccatccagcggagtcctgatttttggaaaaactggagcagctaacaaaactacattggaaaatgtgttaatgacannngaagaagaaattaaaactactaatcctgtagccacggaagaatacgggnnngtcagcagcaacttacaatcgnnnaatactgcaccccagacacaaactgtcaacagccagggagccttacctggcatggtctggcagaaccgggacgtgtacctgcagggtcccatctgggccaagattcctcacacggatggcaactttcacccgtctcctttgatgggcggctttggacttaaacatccgcctcctcagatcctgatcaagaacactcccgttcccgctaatcctccggaggtgtttactcctgccaagtttgcttcgttcatcacacagtacagcaccggacaagtcagcgtggaaatcgagtgggagctgcagaaggaaaacagcaagcgctggaacccggagattcagtacacctccaactatgataagtcgactaatgtggactttgccgttgacagcgagggtgtttactctgagcctcgccctattggcactcgttacctcacccgtaatctg

SEQ ID NO: 3595 - protein, 735 aa, Artificial Sequence
  Synthetic polypeptide
  MOD_RES (162)..(162): Any naturally occurring amino acid
  MOD_RES (168)..(168): Any naturally occurring amino acid
  MOD_RES (224)..(224): Any naturally occurring amino acid
  MOD_RES (310)..(310): Any naturally occurring amino acid
  MOD_RES (410)..(410): Any naturally occurring amino acid
  MOD_RES (446)..(446): Any naturally occurring amino acid
  MOD_RES (461)..(461): Any naturally occurring amino acid
  MOD_RES (471)..(471): Any naturally occurring amino acid
  MOD_RES (708)..(708): Any naturally occurring amino acid
MAADGYLPDWLEDNLSEGIREWWDLKPGAPKPKANQQKQDDGRGLVLPGYKYLGPFNGLDKGEPVNAADAAALEHDKAYDQQLKAGDNPYLRYNHADAEFQERLQEDTSFGGNLGRAVFQAKKRVLEPLGLVEEGAKTAPGKKRPVEQSPQEPDSSSGIGKXGQQPAXKRLNFGQTGDSESVPDPQPLGEPPAAPSGVGSNTMASGGGAPMADNNEGADGVGNXSGNWHCDSTWLGDRVITTSTRTWALPTYNNHLYKQISSQSGASNDNHYFGYSTPWGYFDFNRFHCHFSPRDWQRLINNNWGFRPKXLNFKLFNIQVKEVTTNDGTTTIANNLTSTVQVFTDSEYQLPYVLGSAHQGCLPPFPADVFMIPQYGYLTLNNGSQAVGRSSFYCLEYFPSQMLRTGNNFXFSYTFEDVPFHSSYAHSQSLDRLMNPLIDQYLYYLXRTQTTSGTAQNRELXFSQAGPSSMXNQAKNWLPGPCYRQQRVSKTANDNNNSNFAWTGATKYHLNGRDSLVNPGPAMASHKDDEDKFFPMSGVLIFGKQGAGASNVDLDNVMITDEEEIKTTNPVATEQYGTVATNLQSSNTAPATGTVNSQGALPGMVWQDRDVYLQGPIWAKIPHTDGHFHPSPLMGGFGLKHPPPQILIKNTPVPANPPTTFSPAKFASFITQYSTGQVSVEIEWELQKENSKRWNPEIQYTSNYNKSXNVDFTVDTNGVYSEPRPIGTRYLTRNL

SEQ ID NO: 3596 - DNA, 2205 bp, Artificial Sequence
  Synthetic polynucleotide
  modified_base (484)..(486): a, c, g, or t
  misc_feature (484)..(486): n is a, c, g, or t
  modified_base (502)..(504): a, c, g, or t
  misc_feature (502)..(504): n is a, c, g, or t
  modified_base (670)..(672): a, c, g, or t
  misc_feature (670)..(672): n is a, c, g, or t
  modified_base (928)..(930): a, c, g, or t
  misc_feature (928)..(930): n is a, c, g, or t
  modified_base (1228)..(1230): a, c, g, or t
  misc_feature (1228)..(1230): n is a, c, g, or t
  modified_base (1336)..(1338): a, c, g, or t
  misc_feature (1336)..(1338): n is a, c, g, or t
  modified_base (1381)..(1383): a, c, g, or t
  misc_feature (1381)..(1383): n is a, c, g, or t
  modified_base (1411)..(1413): a, c, g, or t
  misc_feature (1411)..(1413): n is a, c, g, or t
  modified_base (2122)..(2124): a, c, g, or t
  misc_feature (2122)..(2124): n is a, c, g, or t
atggctgccgatggttatcttccagattggctcgaggacaacctctctgagggcattcgcgagtggtgggacttgaaacctggagccccgaaacccaaagccaaccagcaaaagcaggacgacggccggggtctggtgcttcctggctacaagtacctcggacccttcaacggactcgacaagggggagcccgtcaacgcggcggatgcagcggccctcgagcacgacaaggcctacgaccagcagctcaaagcgggtgacaatccgtacctgcggtataaccacgccgacgccgagtttcaggagcgtctgcaagaagatacgtcttttgggggcaacctcgggcgagcagtcttccaggccaagaagagggttctcgaacctcttggtctggttgaggaaggtgctaagacggctcctggaaagaaacgtccggtagagcagtcgccacaagagccagactcctcctcgggcattggcaagnnnggccagcagcccgctnnnaagagactcaattttggtcagactggcgactcagagtcagtccccgacccacaacctctcggagaacctccagcagccccctctggtgtgggatctaatacaatggcttcaggcggtggcgcaccaatggcagacaataacgaaggcgccgacggagtgggtaatnnntcaggaaattggcattgcgattccacatggctgggcgacagagtcatcaccaccagcacccgaacatgggccttgcccacctataacaaccacctctacaagcaaatctccagtcaatcaggggccagcaacgacaaccactacttcggctacagcaccccctgggggtattttgatttcaacagattccactgccatttctcaccacgtgactggcagcgactcatcaacaacaattggggattccggcccaagnnnctcaacttcaagctcttcaacatccaagtcaaggaggtcacgacgaatgatggcaccacgaccatcgctaataaccttaccagcacggttcaagtcttcacggactcggagtaccagttgccgtacgtcctcggctctgcgcaccagggctgcctccctccgttcccggcggacgtgttcatgattccgcagtacggctacctaacgctcaacaatggcagccaggcagtgggacggtcatccttttactgcctggaatatttcccatcgcagatgctgagaacgggcaataactttnnnttcagctacaccttcgaggacgtgcctttccacagcagctacgcgcacagccagagcctggaccggctgatgaatcctctcatcgaccagtacctgtattacctgnnnagaactcagactacgtccggaactgcccaaaacagggagttgnnntttagccaggcgggtccatctagcatgnnnaatcaggccaaaaactggctacctggaccctgttaccggcagcagcgcgtttctaaaacagcaaatgacaacaacaacagcaactttgcctggactggtgctacaaaatatcaccttaatgggcgtgattctttagtcaaccctggccctgctatggcctcacacaaagacgacgaagacaagttctttcccatgagcggtgtcttgatttttggaaagcagggcgccggagcttcaaacgttgatttggacaatgtcatgatcacagacgaagaggaaatcaaaaccactaaccccgtggccaccgaacaatatgggactgtggcaaccaatctccagagcagcaacacagcccctgcgaccggaactgtgaattctcagggagccttacctggaatggtgtggcaagacagagacgtatacctgcagggtcctatttgggccaaaattcctcacacggatggacactttcacccgtctcctctcatgggcggctttggacttaagcacccgcctcctcagatcctcatcaaaaacacgcctgttcctgcgaatcctccgacaacgttttcgcctgcaaagtttgcttcattcatcacccagtattccacaggacaagtgagcgtggagattgaatgggagctgcagaaagaaaacagcaaacgctggaatcccgaaatacagtatacatctaactataataaatctnnnaacgttgatttcactgtggacaccaatggagtttatagtgagcctcgccccattggcacccgttacctcacccgtaacctg

SEQ ID NO: 3597 - protein, 735 aa, Artificial Sequence
  Synthetic polypeptide
  MOD_RES (42)..(42): Any naturally occurring amino acid
  MOD_RES (168)..(168): Any naturally occurring amino acid
  MOD_RES (310)..(310): Any naturally occurring amino acid
  MOD_RES (410)..(410): Any naturally occurring amino acid
  MOD_RES (446)..(446): Any naturally occurring amino acid
  MOD_RES (461)..(461): Any naturally occurring amino acid
  MOD_RES (471)..(471): Any naturally occurring amino acid
  MOD_RES (475)..(475): Any naturally occurring amino acid
  MOD_RES (504)..(504): Any naturally occurring amino acid
  MOD_RES (539)..(539): Any naturally occurring amino acid
MAADGYLPDWLEDNLSEGIREWWDLKPGAPQPKANQQHQDDXRGLVLPGYKYLGPFNGLDKGEPVNEADAAALEHDKAYDQQLKAGDNPYLKYNHADAEFQERLQEDTSFGGNLGRAVFQAKKRVLEPLGLVEEAAKTAPGKKRPVEQSPQEPDSSSGIGKSGQQPAXKRLNFGQTGDSESVPDPQPLGEPPAAPSGVGSNTMASGGGAPMADNNEGADGVGNSSGNWHCDSTWLGDRVITTSTRTWALPTYNNHLYKQISSQSGASNDNHYFGYSTPWGYFDFNRFHCHFSPRDWQRLINNNWGFRPKXLNFKLFNIQVKEVTQNDGTTTIANNLTSTVQVFTDSEYQLPYVLGSAHQGCLPPFPADVFMIPQYGYLTLNNGSQAVGRSSFYCLEYFPSQMLRTGNNFXFSYTFEDVPFHSSYAHSQSLDRLMNPLIDQYLYYLXRTQTTSGTTQQSRLXFSQAGPSSMXQQAXNWLPGPCYRQQRVSKTANDNNNSNFAWTXATKYHLNGRDSLVNPGPAMASHKDDEEKFFPMHGXLIFGKQGTGASNVDLDNVMITDEEEIRTTNPVATEQYGTVATNLQSSNTAPATGTVNSQGALPGMVWQDRDVYLQGPIWAKIPHTDGHFHPSPLMGGFGLKHPPPQILIKNTPVPANPPTTFSPAKFASFITQYSTGQVSVEIEWELQKENSKRWNPEIQYTSNYNKSVNVDFTVDTNGVYSEPRPIGTRYLTRNL

SEQ ID NO: 3598 - DNA, 2205 bp, Artificial Sequence
  Synthetic polynucleotide
  modified_base (124)..(126): a, c, g, or t
  misc_feature (124)..(126): n is a, c, g, or t
  modified_base (502)..(504): a, c, g, or t
  misc_feature (502)..(504): n is a, c, g, or t
  modified_base (928)..(930): a, c, g, or t
  misc_feature (928)..(930): n is a, c, g, or t
  modified_base (1228)..(1230): a, c, g, or t
  misc_feature (1228)..(1230): n is a, c, g, or t
  modified_base (1336)..(1338): a, c, g, or t
  misc_feature (1336)..(1338): n is a, c, g, or t
  modified_base (1381)..(1383): a, c, g, or t
  misc_feature (1381)..(1383): n is a, c, g, or t
  modified_base (1411)..(1413): a, c, g, or t
  misc_feature (1411)..(1413): n is a, c, g, or t
  modified_base (1423)..(1425): a, c, g, or t
  misc_feature (1423)..(1425): n is a, c, g, or t
  modified_base (1510)..(1512): a, c, g, or t
  misc_feature (1510)..(1512): n is a, c, g, or t
  modified_base (1615)..(1617): a, c, g, or t
  misc_feature (1615)..(1617): n is a, c, g, or t
atggctgctgacggttatcttccagattggctcgaggacaacctttctgaaggcattcgtgagtggtgggatctgaaacctggagcccctcaacccaaagcgaaccaacaacaccaggacgacnnncggggtcttgtgcttccgggttacaaatacctcggaccctttaacggactcgacaaaggagagccggtcaacgaggcggacgcggcagccctcgaacacgacaaagcttacgaccagcagctcaaggccggtgacaacccgtacctcaagtacaaccacgccgacgccgagtttcaggagcgtcttcaagaagatacgtcttttgggggcaaccttggcagagcagtcttccaggccaaaaagagggtccttgagcctcttggtctggttgaggaagcagctaaaacggctcctggaaagaagaggcctgtagaacagtctcctcaggaaccggactcatcatctggtattggcaaatcgggccaacagcctgccnnnaaaagactaaatttcggtcagactggagactcagagtcagtcccagaccctcaacctctcggagaaccaccagcagccccctcaggtgtgggatctaatacaatggcttcaggcggtggcgcaccaatggcagacaataacgagggtgccgatggagtgggtaattcctcaggaaattggcattgcgattccacatggctgggcgacagagtcatcaccaccagcaccagaacctgggccctgcccacttacaacaaccatctctacaagcaaatctccagccaatcaggagcttcaaacgacaaccactactttggctacagcaccccttgggggtattttgactttaacagattccactgccacttctcaccacgtgactggcagcgactcattaacaacaactggggattccggcccaagnnnctcaacttcaagctcttcaacatccaagttaaagaggtcacgcagaacgatggcacgacgactattgccaataaccttaccagcacggttcaagtgtttacggactcggagtatcagctcccgtacgtgctcgggtcggcgcaccaaggctgtctcccgccgtttccagcggacgtcttcatgatccctcagtatggatacctcaccctgaacaacggaagtcaagcggtgggacgctcatccttttactgcctggagtacttcccttcgcagatgctaaggactggaaataacttcnnnttcagctataccttcgaggatgtaccttttcacagcagctacgctcacagccagagtttggatcgcttgatgaatcctcttattgatcagtatctgtactacctgnnnagaacgcaaacaacctctggaacaacccaacaatcacggctgnnntttagccaggctgggccttcgtctatgnnncagcaggccnnnaattggctacctgggccctgctaccggcaacagagagtttcaaagactgctaacgacaacaacaacagtaactttgcttggacannngccaccaaatatcatctcaatggccgcgactcgctggtgaatccaggaccagctatggccagtcacaaggacgatgaagaaaaatttttccctatgcacggcnnnctaatatttggcaaacaagggacaggggcaagtaacgtagatttagataatgtaatgattacggatgaagaagagattcgtaccaccaatcctgtggcaacagagcagtatggaactgtggcaactaacttgcagagctcaaatacagctcccgcgactggaactgtcaatagtcagggggccttacctggcatggtgtggcaagatcgtgacgtgtaccttcaaggacctatctgggcaaagattcctcacacggatggacactttcatccttctcctctgatgggaggctttggactgaaacatccgcctcctcaaatcttgatcaaaaatactccggtaccggcaaatcctccgacgactttcagcccggccaagtttgcttcatttatcactcagtactccactggacaggtcagcgtggaaattgagtgggagctacagaaagaaaacagcaaacgttggaatccagagattcagtacacttccaactacaacaagtctgttaatgtggactttactgtagacactaatggtgtttatagtgaacctcgccctattggaacccggtatctcacacgaaacttg

SEQ ID NO: 3599 - protein, 736 aa, Artificial Sequence; identical to SEQ ID NO: 3307
  Synthetic polypeptide

SEQ ID NO: 3600 - protein, 736 aa, Artificial Sequence; identical to SEQ ID NO: 3308
  Synthetic polypeptide

SEQ ID NO: 3601 - protein, 736 aa, Artificial Sequence; identical to SEQ ID NO: 3309
  Synthetic polypeptide

SEQ ID NO: 3602 - protein, 736 aa, Artificial Sequence; identical to SEQ ID NO: 3310
  Synthetic polypeptide

SEQ ID NO: 3603 - protein, 736 aa, Artificial Sequence; identical to SEQ ID NO: 3311
  Synthetic polypeptide

SEQ ID NO: 3604 - protein, 736 aa, Artificial Sequence; identical to SEQ ID NO: 3312
  Synthetic polypeptide

SEQ ID NO: 3605 - protein, 736 aa, Artificial Sequence; identical to SEQ ID NO: 3313
  Synthetic polypeptide

SEQ ID NO: 3606 - protein, 736 aa, Artificial Sequence; identical to SEQ ID NO: 3314
  Synthetic polypeptide

SEQ ID NO: 3607 - DNA, 2211 bp, Artificial Sequence; identical to SEQ ID NO: 3315
  Synthetic polynucleotide

SEQ ID NO: 3608 - protein, 738 aa, Artificial Sequence; identical to SEQ ID NO: 2395
  Synthetic polypeptide

SEQ ID NO: 3609 - protein, 738 aa, Artificial Sequence; identical to SEQ ID NO: 2395
  Synthetic polypeptide

SEQ ID NO: 3610 - protein, 738 aa, Artificial Sequence
  Synthetic polypeptide
  MOD_RES (157)..(157): Any naturally occurring amino acid
  MOD_RES (169)..(169): Any naturally occurring amino acid
  MOD_RES (457)..(457): Any naturally occurring amino acid
  MOD_RES (463)..(463): Any naturally occurring amino acid
  MOD_RES (508)..(508): Any naturally occurring amino acid
  MOD_RES (510)..(511): Any naturally occurring amino acid
  MOD_RES (558)..(558): Any naturally occurring amino acid
  MOD_RES (585)..(585): Any naturally occurring amino acid
  MOD_RES (587)..(587): Any naturally occurring amino acid
MAADGYLPDWLEDNLSEGIREWWDLKPGAPKPKANQQKQDDGRGLVLPGYKYLGPFNGLDKGEPVNAADAAALEHDKAYDQQLKAGDNPYLRYNHADAEFQERLQEDTSFGGNLGRAVFQAKKRVLEPLGLVEEGAKTAPGKKRPVEQSPQEPDSSXLGIGKTGQQPAXKRLNFGQTGDSESVPDPQPLGEPPAAPSGVGSNTMASGGGAPMADNNEGADGVGNSSGNWHCDSTWLGDRVITTSTRTWALPTYNNHLYKQISNGTSGGSTNDNTYFGYSTPWGYFDFNRFHCHFSPRDWQRLINNNWGFRPKRLNFKLFNIQVKEVTTNEGTKTIANNLTSTVQVFTDSEYQLPYVLGSAHQGCLPPFPADVFMIPQYGYLTLNNGSQAVGRSSFYCLEYFPSQMLRTGNNFQFSYTFEDVPFHSSYAHSQSLDRLMNPLIDQYLYYLSRTQTTGTXGTQTLXFSQAGPSSMANQARNWVPGPCYRQQRVSTTTNQNNNSNFAWTGAXKXXLNGRDSLMNPGVAMASHKDDEDRFFPSSGVLIFGKQGAGNDNVDYSXVMITNEEEIKTTNPVATEEYGAVATNXQXLANTQAQTGLVHNQGVLPGMVWQNRDVYLQGPIWAKIPHTDGNFHPSPLMGGFGLKHPPPQILIKNTPVPADPPTTFNQAKLNSFITQYSTGQVSVEIEWELQKENSKRWNPEIQYTSNYYKSTNVDFAVNTEGVYSEPRPIGTRYLTRNL

SEQ ID NO: 3611 - DNA, 2211 bp, Artificial Sequence
  Synthetic polynucleotide
  modified_base (469)..(471): a, c, g, or t
  misc_feature (469)..(471): n is a, c, g, or t
  modified_base (502)..(504): a, c, g, or t
  misc_feature (502)..(504): n is a, c, g, or t
  modified_base (1366)..(1368): a, c, g, or t
  misc_feature (1366)..(1368): n is a, c, g, or t
  modified_base (1384)..(1386): a, c, g, or t
  misc_feature (1384)..(1386): n is a, c, g, or t
  modified_base (1519)..(1521): a, c, g, or t
  misc_feature (1519)..(1521): n is a, c, g, or t
  modified_base (1525)..(1530): a, c, g, or t
  misc_feature (1525)..(1530): n is a, c, g, or t
  modified_base (1669)..(1671): a, c, g, or t
  misc_feature (1669)..(1671): n is a, c, g, or t
  modified_base (1750)..(1752): a, c, g, or t
  misc_feature (1750)..(1752): n is a, c, g, or t
  modified_base (1756)..(1758): a, c, g, or t
  misc_feature (1756)..(1758): n is a, c, g, or t
atggctgccgatggttatcttccagattggctcgaggacaacctctctgagggcattcgcgagtggtgggacttgaaacctggagccccgaaacccaaagccaaccagcaaaagcaggacgacggccggggtctggtgcttcctggctacaagtacctcggacccttcaacggactcgacaagggggagcccgtcaacgcggcggacgcagcggccctcgagcacgacaaagcctacgaccagcagctcaaagcgggtgacaatccgtacctgcggtataatcacgccgacgccgagtttcaggagcgtctgcaagaagatacgtcttttgggggcaacctcgggcgagcagtcttccaggccaagaagcgggttctcgaacctctcggtctggttgaggaaggcgctaagacggctcctggaaagaagaggccggtagagcagtcgccacaagagccagactcctccnnnggcatcggcaagacaggccagcagcccgctnnnaagagactcaattttggtcagactggcgactcagagtcagtccccgacccacaacctctcggagaacctccagcagccccctcaggtgtgggatctaatacaatggcttcaggcggtggcgctccaatggcagacaataacgaaggcgccgacggagtgggtaattcctcgggaaattggcattgcgattccacatggctgggggacagagtcatcaccaccagcacccgaacctgggccctgcccacctacaacaaccacctctacaagcaaatctccaacggcacctcgggaggaagcaccaacgacaacacctattttggctacagcaccccctgggggtattttgacttcaacagattccactgtcacttttcaccacgtgactggcaacgactcatcaacaacaattggggattccggcccaaaagactcaacttcaagctgttcaacatccaggtcaaggaagtcacgacgaacgaaggcaccaagaccatcgccaataatctcaccagcaccgtgcaggtctttacggactcggagtaccagttaccgtacgtgctaggatccgctcaccagggatgtctgcctccgttcccggcggacgtcttcatgattcctcagtacggctatttaactttaaacaatggaagccaagccgtgggacgttcctccttctactgtctggagtatttcccatcgcagatgctgagaaccggcaacaactttcagttcagctacaccttcgaggacgtgcctttccacagcagctacgcgcacagccagagcctggacaggctgatgaatcccctcatcgaccagtacctgtactacctgtccagaacgcaaacgactggaactnnngggacgcagactctgnnnttcagccaagcgggtcctagctcaatggccaaccaggctagaaattgggtgcccggaccttgctaccggcagcagcgcgtctccacgacaaccaaccagaacaacaacagcaactttgcctggacgggagctnnnaagnnnnnnctgaacggccgagactctctaatgaatccgggcgtggcaatggcttcccacaaggatgacgaggaccgcttcttcccttcgagcggggtcctgatttttggcaagcaaggagccgggaacgataatgtggattacagcnnngtgatgattacaaatgaggaagaaatcaagactaccaaccccgtggccacagaagaatatggagcagtggccaccaacnnncagnnngccaatacgcaggcgcagaccggactcgtgcacaaccagggggtgcttcccggcatggtgtggcagaatagagacgtgtacctgcagggtcccatctgggccaaaattcctcacacggacggcaactttcacccgtctcccctgatgggcggctttggactgaagcacccgcctcctcaaattctcatcaagaacacaccggttccagcggacccgccgactaccttcaaccaggccaagctgaactctttcatcacgcagtacagcaccggacaggtcagcgtggaaatcgagtgggagctgcagaaagaaaacagcaaacgctggaatccagagattcaatacacttccaactactacaaatctacaaatgtggactttgctgtcaacacggagggggtttatagcgagcctcgccccattggcacccgttacctcacccgcaacctgtaa

SEQ ID NO: 3612 - protein, 733 aa, Artificial Sequence; identical to SEQ ID NO: 2811
  Synthetic polypeptide

SEQ ID NO: 3613 - DNA, 4472 bp, Artificial Sequence
  Synthetic polynucleotide
ctccatcactaggggtaaccgcgaagcgcctcccacgctgccgcgtcagcgctgacgtaaattacgtcataggggagtggtcctgtattagctgtcacgtgagtgcttttgcgacattttgcgacaccacgtggccattcatggtatatatggccgagtgagcgagcaggatctccattttgaccgcgaaatttgaacgagcagcagccatgccgggcttctacgagatcgtgcttaaggtgccgagcgacctggacgagcacctgccgggcatttctgactcgtttgtgaactgggtggcagagaaggaatgggagctgcccccggattctgacatggatcggaatctgattgagcaggcacccctgaccgtggccgagaagctacagcgcgacttcctggtccaatggcgccgcgtgagtaaggccccggaggccctcttctttgttcagttcgagaagggcgagtcctacttccacctccatattctggtagagaccacgggggtcaaatccatggtgctgggccgcttcctgagtcagattcgggacaagctggtgcagaccatctaccgcgggatcgagccgaccctgcccaactggttcgcggtgacaaagacgcgtaatggcgccggaggggggaacaaggtggtggacgagtgctacatccccaactacctgctgcccaagactcagcccgagctgcagtgggcgtggactaacatggaggagtatataagcgcgtgcttgaacctggccgagcgcaaacggctcgtggcgcagcacctgacccacgtcagccagacccaggagcagaacaaggagaatctgaacccgaattctgacgcgcctgtcatccggtcaaaaacctccgcgcgctacatggagctggtcgggtggctggtggaccggggcatcacctccgagaagcagtggatccaggaggaccaggcctcgtacatctccttcaacgccgcctccaactcgcggtctcagatcaaggccgcgctggacaatgccggcaagatcatggcgctgaccaaatccgcgcccgactacctggtaggccccgctctgcccgcggacattaaatccaaccgcatctaccgcatcctggagctgaatggctacgaccctgcctacgccggttccgtctttctcggctgggcccagaaaaagtttggcaaaaggaacaccatctggctgtttgggccggccaccacgggcaagaccaacatcgcggaagccatcgcccacgccgtgcccttctacggctgcgtcaactggaccaatgagaactttcccttcaacgattgcgtcgacaagatggtgatctggtgggaggagggcaagatgacggccaaggtcgtggagtccgccaaggccattctcggcggcagcaaggtgcgcgtggaccaaaagtgcaagtcgtccgcccagatcgatcccacccccgtgatcgtcacctccaacaccaacatgtgcgccgtgattgacgggaacagcaccaccttcgagcaccagcagccgttgcaggaccggatgttcaaatttgaacttacccgccgtctggagcacgactttggcaaggtgacaaagcaggaagtcaaagagttcttccgctgggcgcaggatcacgtgaccgaggtggcgcatgagttctacgtcagaaagggtggagctaacaaaagacccgcccccgatgacgcggatataagcgagcccaagcgggcctgcccctcagtcgcggatccatcgacgtcagacgcggaaggagctccggtggactttgccgacaggtaccaaaacaaatgttctcgtcacgcgggcatgcttcagatgctgtttccctgcaaaacatgcgagagaatgaatcagaatttcaacatttgcttcacgcacgggaccagagactgttcagaatgtttccctggcgtgtcagaatctcaaccggtcgtcagaaaaaagacgtatcggaaactctgtgcgattcatcatctgctggggcgggcacccgagattgcttgctcggcctgcgacctggtcaacgtggacctggatgactgtgtttctgagcaataaatgacttaaaccaggtatggctgccgatggttatcttccagattggctcgaggacaacctctctgagggcattcgcgagtggtgggacctgaaacctggagccccgaaacccaaagccaaccagcaaaagcaggacaacggccggggtctggtgcttcctggctacaagtacctcggacccttcaacggactcgacaagggggagcccgtcaacgcggcggacgcagcggccctcgagcacgacaaggcctacgaccagcagctccaagcgggtgacaatccgtacctgcggtataatcacgccgacgccgagtttcaggagcgtctgcaagaagatacgtcttttgggggcaacctcgggcgcgcagtcttccaggccaaaaagcgggttctcgaacctctgggcctggttgaatcgccggttaagacggctcctggaaagaagagaccggtagagccatcaccccagcgctctccagactcctctacgggcatcggcaagaaaggccagcagcccgcaaaaaagagactcaattttgggcagactggcgactcagagtcagtccccgaccctcaaccaatcggagaaccaccagcaggcccctctggtctgggatctggtacaatggctgcaggcggtggcgctccaatggcagacaataacgaaggcgccgacggagtgggtagttcctcaggaaattggcattgcgattccacatggctgggcgacagagtcatcaccaccagcacccgcacctgggccctgcccacctacaacaaccacctctacaagcaaatctccaacgggacctcgggaggaagcaccaacgacaacacctacttcggctacagcaccccctgggggtattttgacttcaacagattccactgccacttttcaccacgtgactggcagcgactcatcaacaacaactggggattccggcccaagaggctcaacttcaagctcttcaacatccaagtcaaggaggtcacgcagaatgaaggcaccaagaccatcgccaataaccttaccagcacgattcaggtctttacggactcggaataccagctcccgtacgtgctcggctcggcgcaccagggctgcctgcctccgttcccggcggacgtcttcatgattcctcagtacgggtacctgactctgaacaatggcagtcaggctgtgggccggtcgtccttctactgcctggagtactttccttctcaaatgctgagaacgggcaacaactttgaattcagctacaacttcgaggacgtgcccttccacagcagctacgcgcacagccagagcctggaccggctgatgaaccctctcatcgaccagtacttgtactacctgtcccggactcaaagcacgggcggtactgcaggaactcagcagttgctattttctcaggccgggcctaacaacatgtcggctcaggccaagaactggctacccggtccctgctaccggcagcaacgcgtctccacgacactgtcgcagaacaacaacagcaactttgcctggacgggtgccaccaagtatcatctgaatggcagagactctctggtgaatcctggcgttgccatggctacccacaaggacgacgaagagcgattttttccatccagcggagtcttaatgtttgggaaacagggagctggaaaagacaacgtggactatagcagcgtgatgctaaccagcgaggaagaaataaagaccaccaacccagtggccacagaacagtacggcgtggtggccgataacctgcaacagcaaaacgccgctcctattgtaggggccgtcaatagtcaaggagccttacctggcatggtgtggcagaaccgggacgtgtacctgcagggtcccatctgggccaagattcctcatacggacggcaactttcatccctcgccgctgatgggaggctttggactgaagcatccgcctcctcagatcctgattaaaaacacacctgttcccgcggatcctccgaccaccttcactaaggccaagctggcttctttcatcacgcagtacagtaccggccaggtcagcgtggagatcgagtgggagctgcagaaggagaacagcaaacgctggaacccagagattcagtacacttccaactactacaaatctacaaatgtggactttgctgtcaatactgagggtacttattccgagcctcgccccattggcacccgttacctcacccgtaatctgtaattacatgttaatcaataaaccggttaattcgtttcagttgaactttggtctcctgtccttcttatcttatcggttaccatagaaactggttacttattaactgcttggtgcgcttcgcgataaaagacttacgtcatcgggttacccctagtgatgga

SEQ ID NO: 3614 - DNA, 2208 bp, Artificial Sequence
  Synthetic polynucleotide
atggctgccgatggttatcttccagattggctcgaggacactctctctgaaggaataagacagtggtggaagctcaaacctggcccaccaccaccaaagcccgcagagcggcataaggacgacagcaggggtcttgtgcttcctgggtacaagtacctcggacccttcaacggactcgacaagggagagccggtcaacgaggcagacgccgcggccctcgagcacgacaaagcctacgaccggcagctcgacagcggagacaacccgtacctcaagtacaaccacgccgacgcggagtttcaggagcgccttaaagaagatacgtcttttgggggcaacctcggacgagcagtcttccaggcgaaaaagagggttcttgaacctctgggcctggttgaggaacctgttaagaaggctccgggaaaaaagaggccggtagagcactctcctgtggagccagactcctcctcgggaaccggaaaggcgggccagcagcctgcaagaaaaagattgaattttggtcagactggagacgcagactcagtacctgacccccagcctctcggacagccaccagcagccccctctggtctgggaactaataccatggctacaggcagtggcgcaccaatggcagacaataacgagggtgccgacggagtgggtaattcctcgggaaattggcattgcgattccacatggatgggcgacagagtcatcaccaccagcacccgaacctgggccctgcccacctacaacaaccacctctacaaacaaatttccagccaatcaggagcctcgaacgacaatcactactttggctacagcaccccttgggggtattttgacttcaacagattccactgccacttttcaccacgtgactggcaaagactcatcaacaacaactggggattccgacccaagagactcaacttcaagctctttaacattcaagtcaaagaggtcacgcagaatgacggtacgacgacgattgccaataaccttaccagcacggttcaggtgtttactgactcggagtaccagctcccgtacgtcctcggctcggcgcatcaaggatgcctcccgccgttcccagcagacgtcttcatggtgccacagtatggatacctcaccctgaacaacgggagtcaggcagtaggacgctcttcattttactgcctggagtactttccttctcagatgctgcgtaccggaaacaactttaccttcagctacacttttgaggacgttcctttccacagcagctacgctcacagccagagtctggaccgtctcatgaatcctctcatcgaccagtacctgtattacttgagcagaacaaacactccaagtggaaccaccacgcagtcaaggcttcagttttctcaggccggagcgagtgacattcgggaccagtctaggaactggcttcctggaccctgttaccgccagcagcgagtatcaaagacatctgcggataacaacaacagtgaatactcgtggactggagctaccaagtaccacctcaatggcagagactctctggtgaatccgggcccggctatggcaagccacaaggacgatgaagaaaagttttttcctcagagcggggttctcatctttgggaagcaaggctcagagaaaacaaatgtggacattgaaaaggtcatgattacagacgaagaggaaatcaggacaaccaatcccgtggctacggagcagtatggttctgtatctaccaacctccagagaggcaacagacaagcagctaccgcagatgtcaacacacaaggcgttcttccaggcatggtctggcaggacagagatgtgtaccttcaggggcccatctgggcaaagattccacacacggacggacattttcacccctctcccctcatgggtggattcggacttaaacaccctcctccacagattctcatcaagaacaccccggtgcctgcgaatccttcgaccaccttcagtgcggcaaagtttgcttccttcatcacacagtactccacgggacaggtcagcgtggagatcgagtgggagctgcagaaggaaaacagcaaacgctggaatcccgaaattcagtacacttccaactacaacaagtctgttaatgtggactttactgtggacactaatggcgtgtattcagagcctcgccccattggcaccagatacctgactcgtaatctgtaa

SEQ ID NO: 3615 - protein, 735 aa, Artificial Sequence
  Synthetic polypeptide
MAADGYLPDWLEDTLSEGIRQWWKLKPGPPPPKPAERHKDDSRGLVLPGYKYLGPFNGLDKGEPVNEADAAALEHDKAYDRQLDSGDNPYLKYNHADAEFQERLKEDTSFGGNLGRAVFQAKKRVLEPLGLVEEPVKKAPGKKRPVEHSPVEPDSSSGTGKAGQQPARKRLNFGQTGDADSVPDPQPLGQPPAAPSGLGTNTMATGSGAPMADNNEGADGVGNSSGNWHCDSTWMGDRVITTSTRTWALPTYNNHLYKQISSQSGASNDNHYFGYSTPWGYFDFNRFHCHFSPRDWQRLINNNWGFRPKRLNFKLFNIQVKEVTQNDGTTTIANNLTSTVQVFTDSEYQLPYVLGSAHQGCLPPFPADVFMVPQYGYLTLNNGSQAVGRSSFYCLEYFPSQMLRTGNNFTFSYTFEDVPFHSSYAHSQSLDRLMNPLIDQYLYYLSRTNTPSGTTTQSRLQFSQAGASDIRDQSRNWLPGPCYRQQRVSKTSADNNNSEYSWTGATKYHLNGRDSLVNPGPAMASHKDDEEKFFPQSGVLIFGKQGSEKTNVDIEKVMITDEEEIRTTNPVATEQYGSVSTNLQRGNRQAATADVNTQGVLPGMVWQDRDVYLQGPIWAKIPHTDGHFHPSPLMGGFGLKHPPPQILIKNTPVPANPSTTFSAAKFASFITQYSTGQVSVEIEWELQKENSKRWNPEIQYTSNYNKSVNVDFTVDTNGVYSEPRPIGTRYLTRNL

SEQ ID NO: 3616 - DNA, 8376 bp, Artificial Sequence
  Synthetic polynucleotide
aattcccatcatcaataatataccttattttggattgaagccaatatgataatgagggggtggagtttgtgacgtggcgcggggcgtgggaacggggcgggtgacgtagtagtctctagagtcctgtattagaggtcacgtgagtgttttgcgacattttgcgacaccatgtggtcacgctgggtatttaagcccgagtgagcacgcagggtctccattttgaagcgggaggtttgaacgcgcagccaccacgccggggttttacgagattgtgattaaggtccccagcgaccttgacgggcatctgcccggcatttctgacagctttgtgaactgggtggccgagaaggaatgggagttgccgccagattctgacatggatctgaatctgattgagcaggcacccctgaccgtggccgagaagctgcagcgcgactttctgacggaatggcgccgtgtgagtaaggccccggaggcccttttctttgtgcaatttgagaagggagagagctacttccacatgcacgtgctcgtggaaaccaccggggtgaaatccatggttttgggacgtttcctgagtcagattcgcgaaaaactgattcagagaatttaccgcgggatcgagccgactttgccaaactggttcgcggtcacaaagaccagaaatggcgccggaggcgggaacaaggtggtggatgagtgctacatccccaattacttgctccccaaaacccagcctgagctccagtgggcgtggactaatatggaacagtatttaagcgcctgtttgaatctcacggagcgtaaacggttggtggcgcagcatctgacgcacgtgtcgcagacgcaggagcagaacaaagagaatcagaatcccaattctgatgcgccggtgatcagatcaaaaacttcagccaggtacatggagctggtcgggtggctcgtggacaaggggattacctcggagaagcagtggatccaggaggaccaggcctcatacatctccttcaatgcggcctccaactcgcggtcccaaatcaaggctgccttggacaatgcgggaaagattatgagcctgactaaaaccgcccccgactacctggtgggccagcagcccgtggaggacatttccagcaatcggatttataaaattttggaactaaacgggtacgatccccaatatgcggcttccgtctttctgggatgggccacgaaaaagttcggcaagaggaacaccatctggctgtttgggcctgcaactaccgggaagaccaacatcgcggaggccatagcccacactgtgcccttctacgggtgcgtaaactggaccaatgagaactttcccttcaacgactgtgtcgacaagatggtgatctggtgggaggaggggaagatgaccgccaaggtcgtggagtcggccaaagccattctcggaggaagcaaggtgcgcgtggaccagaaatgcaagtcctcggcccagatagacccgactcccgtgatcgtcacctccaacaccaacatgtgcgccgtgattgacgggaactcaacgaccttcgaacaccagcagccgttgcaagaccggatgttcaaatttgaactcacccgccgtctggatcatgactttgggaaggtcaccaagcaggaagtcaaagactttttccggtgggcaaaggatcacgtggttgaggtggagcatgaattctacgtcaaaaagggtggagccaagaaaagacccgcccccagtgacgcagatataagtgagcccaaacgggtgcgcgagtcagttgcgcagccatcgacgtcagacgcggaagcttcgatcaactacgcagacaggtaccaaaacaaatgttctcgtcacgtgggcatgaatctgatgctgtttccctgcagacaatgcgagagaatgaatcagaattcaaatatctgcttcactcacggacagaaagactgtttagagtgctttcccgtgtcagaatctcaacccgtttctgtcgtcaaaaaggcgtatcagaaactgtgctacattcatcatatcatgggaaaggtgccagacgcttgcactgcctgcgatctggtcaatgtggatttggatgactgcatctttgaacaataaatgatttaaatcaggtatggctgccgatggttatcttccagattggctcgaggacactctctctgaaggaataagacagtggtggaagctcaaacctggcccaccaccaccaaagcccgcagagcggcataaggacgacagcaggggtcttgtgcttcctgggtacaagtacctcggacccttcaacggactcgacaagggagagccggtcaacgaggcagacgccgcggccctcgagcacgacaaagcctacgaccggcagctcgacagcggagacaacccgtacctcaagtacaaccacgccgacgcggagtttcaggagcgccttaaagaagatacgtcttttgggggcaacctcggacgagcagtcttccaggcgaaaaagagggttcttgaacctctgggcctggttgaggaacctgttaagacggctccgggaaaaaagaggccggtagagcactctcctgtggagccagactcctcctcgggaaccggaaaggcgggccagcagcctgcaagaaaaagattgaattttggtcagactggagacgcagactcagtacctgacccccagcctctcggacagccaccagcagccccctctggtctgggaactaatacgatggctacaggcagtggcgcaccaatggcagacaataacgagggcgccgacggagtgggtaattcctcgggaaattggcattgcgattccacatggatgggcgacagagtcatcaccaccagcacccgaacctgggccctgcccacctacaacaaccacctctacaaacaaatttccagccaatcaggagcctcgaacgacaatcactactttggctacagcaccccttgggggtattttgacttcaacagattccactgccacttttcaccacgtgactggcaaagactcatcaacaacaactggggattccgacccaagagactcaacttcaagctctttaacattcaagtcaaagaggtcacgcagaatgacggtacgacgacgattgccaataaccttaccagcacggttcaggtgtttactgactcggagtaccagctcccgtacgtcctcggctcggcgcatcaaggatgcctcccgccgttcccagcagacgtcttcatggtgccacagtatggatacctcaccctgaacaacgggagtcaggcagtaggacgctcttcattttactgcctggagtactttccttctcagatgctgcgtaccggaaacaactttaccttcagctacacttttgaggacgttcctttccacagcagctacgctcacagccagagtctggaccgtctcatgaatcctctcatcgaccagtacctgtattacttgagcagaacaaacactccaagtggaaccaccacgcagtcaaggcttcagttttctcaggccggagcgagtgacattcgggaccagtctaggaactggcttcctggaccctgttaccgccagcagcgagtatcaaagacatctgcggataacaacaacagtgaatactcgtggactggagctaccaagtaccacctcaatggcagagactctctggtgaatccgggcccggccatggcaagccacaaggacgatgaagaaaagttttttcctcagagcggggttctcatctttgggaagcaaggctcagagaaaacaaatgtggacattgaaaaggtcatgattacagacgaagaggaaatcaggacaaccaatcccgtggctacggagcagtatggttctgtatctaccaacctccagagaggcaacagacaagcagctaccgcagatgtcaacacacaaggcgttcttccaggcatggtctggcaggacagagatgtgtaccttcaggggcccatctgggcaaagattccacacacggacggacattttcacccctctcccctcatgggtggattcggacttaaacaccctcctccacagattctcatcaagaacaccccggtacctgcgaatccttcgaccaccttcagtgcggcaaagtttgcttccttcatcacacagtactccacgggacaggtcagcgtggagatcgagtgggagctgcagaaggaaaacagcaaacgctggaatcccgaaattcagtacacttccaactacaacaagtctgttaatgtggactttactgtggacactaatggcgtgtattcagagcctcgccccattggcaccagatacctgactcgtaatctgtaattgcttgttaatcaataaaccgtttaattcgtttcagttgaactttggtctctgcgtatttctttcttatctagtttccatgctctagagtcctgtattagaggtcacgtgagtgttttgcgacattttgcgacaccatgtggtcacgctgggtatttaagcccgagtgagcacgcagggtctccattttgaagcgggaggtttgaacgcgcagccaccacggcggggttttacgagattgtgattaaggtccccagcgaccttgacgggcatctgcccggcatttctgacagctttgtgaactgggtggccgagaaggaatgggagttgccgccagattctgacatggatctgaatctgattgagcaggcacccctgaccgtggccgagaagctgcatcgctggcgtaatagcgaagaggcccgcaccgatcgcccttcccaacagttgcgcagcctgaatggcgaatggaattccagacgattgagcgtcaaaatgtaggtatttccatgagcgtttttcctgttgcaatggctggcggtaatattgttctggatattaccagcaaggccgatagtttgagttcttctactcaggcaagtgatgttattactaatcaaagaagtattgcgacaacggttaatttgcgtgatggacagactcttttactcggtggcctcactgattataaaaacacttctcaggattctggcgtaccgttcctgtctaaaatccctttaatcggcctcctgtttagctcccgctctgattctaacgaggaaagcacgttatacgtgctcgtcaaagcaaccatagtacgcgccctgtagcggcgcattaagcgcggcgggtgtggtggttacgcgcagcgtgaccgctacacttgccagcgccctagcgcccgctcctttcgctttcttcccttcctttctcgccacgttcgccggctttccccgtcaagctctaaatcgggggctccctttagggttccgatttagtgctttacggcacctcgaccccaaaaaacttgattagggtgatggttcacgtagtgggccatcgccctgatagacggtttttcgccctttgacgttggagtccacgttctttaatagtggactcttgttccaaactggaacaacactcaaccctatctcggtctattcttttgatttataagggattttgccgatttcggcctattggttaaaaaatgagctgatttaacaaaaatttaacgcgaattttaacaaaatattaacgtttacaatttaaatatttgcttatacaatcttcctgtttttggggcttttctgattatcaaccggggtacatatgattgacatgctagttttacgattaccgttcatcgattctcttgtttgctccagactctcaggcaatgacctgatagcctttgtagagacctctcaaaaatagctaccctctccggcatgaatttatcagctagaacggttgaatatcatattgatggtgatttgactgtctccggcctttctcacccgtttgaatctttacctacacattactcaggcattgcatttaaaatatatgagggttctaaaaatttttatccttgcgttgaaataaaggcttctcccgcaaaagtattacagggtcataatgtttttggtacaaccgatttagctttatgctctgaggctttattgcttaattttgctaattctttgccttgcctgtatgatttattggatgttggaattcctgatgcggtattttctccttacgcatctgtgcggtatttcacaccgcatatggtgcactctcagtacaatctgctctgatgccgcatagttaagccagccccgacacccgccaacacccgctgacgcgccctgacgggcttgtctgctcccggcatccgcttacagacaagctgtgaccgtctccgggagctgcatgtgtcagaggttttcaccgtcatcaccgaaacgcgcgagacgaaagggcctcgtgatacgcctatttttataggttaatgtcatgataataatggtttcttagacgtcaggtggcacttttcggggaaatgtgcgcggaacccctatttgtttatttttctaaatacattcaaatatgtatccgctcatgagacaataaccctgataaatgcttcaataatattgaaaaaggaagagtatgagtattcaacatttccgtgtcgcccttattcccttttttgcggcattttgccttcctgtttttgctcacccagaaacgctggtgaaagtaaaagatgctgaagatcagttgggtgcacgagtgggttacatcgaactggatctcaacagcggtaagatccttgagagttttcgccccgaagaacgttttccaatgatgagcacttttaaagttctgctatgtggcgcggtattatcccgtattgacgccgggcaagagcaactcggtcgccgcatacactattctcagaatgacttggttgagtactcaccagtcacagaaaagcatcttacggatggcatgacagtaagagaattatgcagtgctgccataaccatgagtgataacactgcggccaacttacttctgacaacgatcggaggaccgaaggagctaaccgcttttttgcacaacatgggggatcatgtaactcgccttgatcgttgggaaccggagctgaatgaagccataccaaacgacgagcgtgacaccacgatgcctgtagcaatggcaacaacgttgcgcaaactattaactggcgaactacttactctagcttcccggcaacaattaatagactggatggaggcggataaagttgcaggaccacttctgcgctcggcccttccggctggctggtttattgctgataaatctggagccggtgagcgtgggtctcgcggtatcattgcagcactggggccagatggtaagccctcccgtatcgtagttatctacacgacggggagtcaggcaactatggatgaacgaaatagacagatcgctgagataggtgcctcactgattaagcattggtaactgtcagaccaagtttactcatatatactttagattgatttaaaacttcatttttaatttaaaaggatctaggtgaagatcctttttgataatctcatgaccaaaatcccttaacgtgagttttcgttccactgagcgtcagaccccgtagaaaagatcaaaggatcttcttgagatcctttttttctgcgcgtaatctgctgcttgcaaacaaaaaaaccaccgctaccagcggtggtttgtttgccggatcaagagctaccaactctttttccgaaggtaactggcttcagcagagcgcagataccaaatactgtccttctagtgtagccgtagttaggccaccacttcaagaactctgtagcaccgcctacatacctcgctctgctaatcctgttaccagtggctgctgccagtggcgataagtcgtgtcttaccgggttggactcaagacgatagttaccggataaggcgcagcggtcgggctgaacggggggttcgtgcacacagcccagcttggagcgaacgacctacaccgaactgagatacctacagcgtgagctatgagaaagcgccacgcttcccgaagggagaaaggcggacaggtatccggtaagcggcagggtcggaacaggagagcgcacgagggagcttccagggggaaacgcctggtatctttatagtcctgtcgggtttcgccacctctgacttgagcgtcgatttttgtgatgctcgtcaggggggcggagcctatggaaaaacgccagcaacgcggcctttttacggttcctggccttttgctggccttttgctcacatgttctttcctgcgttatcccctgattctgtggataaccgtattaccgcctttgagtgagctgataccgctcgccgcagccgaacgaccgagcgcagcgagtcagtgagcgaggaagcggaagagcgcccaatacgcaaaccgcctctccccgcgcgttggccgattcattaatgca

SEQ ID NO: 3617 - DNA, 1085 bp, Artificial Sequence
  Synthetic polynucleotide
  modified_base (611)..(611): a, c, g, or t
  misc_feature (611)..(611): n is a, c, g, or t
  modified_base (640)..(640): a, c, g, or t
  misc_feature (640)..(640): n is a, c, g, or t
  modified_base (1039)..(1039): a, c, g, or t
  misc_feature (1039)..(1039): n is a, c, g, or t
tgcccacttacaacaaccatctctacaagcaaatctccagcvvmdcaggagctascaacgacaaccactactttggctacagcaccccttgggggtattttgactttaacagattccactgccacttctcaccacgtgactggcagcgactcattaacaacaactggggattccggcccaagaaactcagcttcaagctcttcaacatccaagttagaggggtcacgcagaacgatggcacgacgactattgccaataaccttaccagcacggttcaagtgtttacggactcggagtatcagctcccgtacgtgctcgggtcggcgcaccaaggctgtctcccgccgtttccagcggacgtcttcatggtccctcagtatggatacctcaccctgaacaacggaagtcaagcggtgggacgctcatccttttactgcctggagtacttcccttcgcagatgctaaggactggaaataacttccaattcagctataccttcgaggatgtaccttttcacagcagctacgctcacagccagagtttggatcgcttgatgaatcctcttattgatcagtatctgtactacctgaacagaacgcaargcamcvcnrgcggaacarccrvcmhsmrsvvsctgvngtttagccaggctgggcctcagtctatgtctttgcaggccagaaattggctacctgggccctgctaccggcaacagagactttcaamarycbmcrvcsrsaacaacaacagtrastttccttggmcagcggccagcamatatcatctcaatggccgcgactcgctggtgaatccaggaccagctatggccagtcacrrggacgatrmsgrsaratttttccctatgcacggcaatctaatatttggcaaasaarrcrscrvsrvarvcratrycgmsdwcgrsvrsgtaatgattacggatgaagaagagattcgtaccaccaatcctgtggcaacagagcagtatggaactgtggcaaataacttgcagrvsvvsmrsrvcvvscccacgdhtvvsrnsgtcvmscatcagggggccttacctggcatggtgtggcaagatcgt

SEQ ID NO: 3618 - protein, 620 aa, Artificial Sequence
  Synthetic polypeptide
  MOD_RES (263)..(264): Any naturally occurring amino acid
  MOD_RES (267)..(267): Any naturally occurring amino acid
  MOD_RES (450)..(453): Any naturally occurring amino acid
  MOD_RES (456)..(460): Any naturally occurring amino acid
  MOD_RES (462)..(462): Any naturally occurring amino acid
  MOD_RES (491)..(495): Any naturally occurring amino acid
  MOD_RES (500)..(500): Any naturally occurring amino acid
  MOD_RES (504)..(504): Any naturally occurring amino acid
  MOD_RES (508)..(508): Any naturally occurring amino acid
  MOD_RES (528)..(528): Any naturally occurring amino acid
  MOD_RES (531)..(533): Any naturally occurring amino acid
  MOD_RES (546)..(557): Any naturally occurring amino acid
  MOD_RES (586)..(590): Any naturally occurring amino acid
  MOD_RES (593)..(595): Any naturally occurring amino acid
  MOD_RES (597)..(597): Any naturally occurring amino acid
MAADGYLPDWLEDNLSEGIREWWALKPGVPQPKANQQHQDNRRGLVLPGYKYLGPGNGLDKGEPVNEADAAALEHDKAYDQQLKAGDNPYLKYNHADAEFQERLQEDTSFGGNLGRAVFQAKKRILEPLGLVEEAAKTAPGKKGAVDQSPQEPDSSSGVGKSGKQPARKRLNFGQTGDSESVPDPQPLGEPPAAPTSLGSNTMASGGGAPMADNNEGADGVGNSSGNWHCDSQWLGDRVITTSTRTWALPTYNNHLYKQISSXXGAXNDNHYFGYSTPWGYFDFNRFHCHFSPRDWQRLINNNWGFRPKKLSFKLFNIQVRGVTQNDGTTTIANNLTSTVQVFTDSEYQLPYVLGSAHQGCLPPFPADVFMVPQYGYLTLNNGSQAVGRSSFYCLEYFPSQMLRTGNNFQFSYTFEDVPFHSSYAHSQSLDRLMNPLIDQYLYYLNRTQXXXXGTXXXXXLXFSQAGPQSMSLQARNWLPGPCYRQQRLSXXXXXNNNSXFPWXAASXYHLNGRDSLVNPGPAMASHXDDXXXFFPMHGNLIFGKXXXXXXXXXXXXVMITDEEEIRTTNPVATEQYGTVANNLQXXXXXPTXXXVXHQGALPGMVWQDRDVYLQGPIWA

SEQ ID NO: 3619 - DNA, 1491 bp, Artificial Sequence
  Synthetic polynucleotide
accaccagcaccagaacctgggccctgcccacttacaacaaccatctctacaagcaaatctccagccaatcaggagcttcaaacgacaaccactactttggctacagcaccccttgggggtattttgactttaacagattccactgccacttctcaccacgtgactggcagcgactcattaacaacaactggggattccggcccaagaaactcagcttcaagctcttcaacatccaagttagaggggtcacgcagaacgatggcacgacgactattgccaataaccttaccagcacggttcaagtgtttacggactcggagtatcagctcccgtacgtgctcgggtcggcgcaccaaggctgtctcccgccgtttccagcggacgtcttcatggtccctcagtatggatacctcaccctgaacaacggaagtcaagcggtgggacgctcatccttttactgcctggagtacttcccttcgcagatgctaaggactggaaataacttccaattcagctataccttcgaggatgtaccttttcacagcagctacgctcacagccagagtttggatcgcttgatgaatcctcttattgatcagtatctgtactacctgaacagaacgcaaggaacaacctctggaacaaccaaccaatcacggctgctttttagccaggctgggcctcagtctatgtctttgcaggccagaaattggctacctgggccctgctaccggcaacagagactttcaaagactgctaacgacaacaacaacagtaactttccttggacagcggccagcaaatatcatctcaatggccgcgactcgctggtgaatccaggaccagctatggccagtcacaaggacgatgaagaaaaatttttccctatgcacggcaatctaatatttggcaaagaagggacaacggcaagtaacgcagaattagataatgtaatgattacggatgaagaagagattcgtaccaccaatcctgtggcaacagagcagtatggaactgtggcaaataacttgcagagctcaaatacagctcccacgactggaactgtcaatcatcagggggccttacctggcatggtgtggcaagatcgtgacgtctaccttcaaggacctatctgggcaaagattcctcacacggatggacactttcatccttctcctctgatgggaggctttggactgaaacatccgcctcctcaaatcatgatcaaaaatactccggtaccggcaaatcctccgacgactttcagcccggccaagtttgcttcatttatcactcagtactccactggacaggtcagcgtggaaattgagtgggagctacagaaagaaaacagcaaacgttggaatccagagattcagtacacttccaactacaacaagtctgttaatgtggactttactgtagacactaatggtgtttatagtgaacctcgccctattggaacccggtatctcacacgaaacttgtga

SEQ ID NO: 3620 - protein, 482 aa, Artificial Sequence
  Synthetic polypeptide
TTSTRTWALPTYNNHLYKQISSQSGASNDNHYFGYSTPWYFDFNRFHCHFSPRDWQRLNNNWGFRPKKLSFKLFNIQRGVTQNDGTTTIANNLTSTQVFTDSEYQLPYVLGSAHQCLPPFPADVFMVPQYGYLTNNGSQAVGRSSFYCLEYFPQMLRTGNNFQFSYTFEDVPHSSYAHSQSLDRLMNPLIDYLYYLNRTQGTTSGTTNQSLLFSQAGPQSMSLQARNWLGPCYRQQRLSKTANDNNNSFPWTAASKYHLNGRDSLVNGPAMASHKDDEEKFFPMHGLIFGKEGTTASNAELDNVMITDEEEIRTTNPVATEQYGTVANNLQSSNTAPTTGTVNHQGALPGMVWQDRDVYLQGPIWAKIPHTDGHFHPSPLMGGFGLKHPPPQIMIKNTPVPANPPTTFSPAKFASFITQYSTGQVSVEIEWELQKENSKRWNPEIQYTSNYNKSVNVDFTVDTNGVYSEPRPIGTRYLTRNL

SEQ ID NO: 3621 - DNA, 1140 bp, Artificial Sequence
  Synthetic polynucleotide
  modified_base (636)..(636): a, c, g, or t
  misc_feature (636)..(636): n is a, c, g, or t
  modified_base (665)..(665): a, c, g, or t
  misc_feature (665)..(665): n is a, c, g, or t
  modified_base (1064)..(1064): a, c, g, or t
  misc_feature (1064)..(1064): n is a, c, g, or t
accaccagcaccagaacctgggccctgcccacttacaacaaccatctctacaagcaaatctccagcvvmdcaggagctascaacgacaaccactactttggctacagcaccccttgggggtattttgactttaacagattccactgccacttctcaccacgtgactggcagcgactcattaacaacaactggggattccggcccaagaaactcagcttcaagctcttcaacatccaagttagaggggtcacgcagaacgatggcacgacgactattgccaataaccttaccagcacggttcaagtgtttacggactcggagtatcagctcccgtacgtgctcgggtcggcgcaccaaggctgtctcccgccgtttccagcggacgtcttcatggtccctcagtatggatacctcaccctgaacaacggaagtcaagcggtgggacgctcatccttttactgcctggagtacttcccttcgcagatgctaaggactggaaataacttccaattcagctataccttcgaggatgtaccttttcacagcagctacgctcacagccagagtttggatcgcttgatgaatcctcttattgatcagtatctgtactacctgaacagaacgcaargcamcvcnrgcggaacarccrvcmhsmrsvvsctgvngtttagccaggctgggcctcagtctatgtctttgcaggccagaaattggctacctgggccctgctaccggcaacagagactttcaamarycbmcrvcsrsaacaacaacagtrastttccttggmcagcggccagcamatatcatctcaatggccgcgactcgctggtgaatccaggaccagctatggccagtcacrrggacgatrmsgrsaratttttccctatgcacggcaatctaatatttggcaaasaarrcrscrvsrvarvcratrycgmsdwcgrsvrsgtaatgattacggatgaagaagagattcgtaccaccaatcctgtggcaacagagcagtatggaactgtggcaaataacttgcagrvsvvsmrsrvcvvscccacgdhtvvsrnsgtcvmscatcagggggccttacctggcatggtgtggcaagatcgtgacgtctaccttcaaggacctatctgggca

SEQ ID NO: 3622 - protein, 620 aa, Artificial Sequence; identical to SEQ ID NO: 3618
  Synthetic polypeptide
  MOD_RES (263)..(264): Any naturally occurring amino acid
  MOD_RES (267)..(267): Any naturally occurring amino acid
  MOD_RES (450)..(453): Any naturally occurring amino acid
  MOD_RES (456)..(460): Any naturally occurring amino acid
  MOD_RES (462)..(462): Any naturally occurring amino acid
  MOD_RES (491)..(495): Any naturally occurring amino acid
  MOD_RES (500)..(500): Any naturally occurring amino acid
  MOD_RES (504)..(504): Any naturally occurring amino acid
  MOD_RES (508)..(508): Any naturally occurring amino acid
  MOD_RES (528)..(528): Any naturally occurring amino acid
  MOD_RES (531)..(533): Any naturally occurring amino acid
  MOD_RES (546)..(557): Any naturally occurring amino acid
  MOD_RES (586)..(590): Any naturally occurring amino acid
  MOD_RES (593)..(595): Any naturally occurring amino acid
  MOD_RES (597)..(597): Any naturally occurring amino acid

SEQ ID NO: 3623 - protein, 738 aa, Artificial Sequence; identical to SEQ ID NO: 2395
  Synthetic polypeptide

SEQ ID NO: 3624 - DNA, 2258 bp, Artificial Sequence
  Synthetic polynucleotide
tcgaggacaacctctctgagggcattcgcgagtggtgggacttgaaacctggagccccgaaacccaaagccaaccagcaaaagcaggacgacggccggggtctggtgcttcctggctacaagtacctcggacccttcaacggactcgacaagggggagcccgtcaacgcggcggacgcagcggccctcgagcacgacaaggcctacgaccagcagctcaaagcgggtgacaatccgtacctgcggtataaccacgccgacgccgagtttcaggagcgtctgcaagaagatacgtcttttgggggcaacctcgggcgagcagtcttccaggccaagaagcgggttctcgaacctctcggtctggttgaggaaggcgctaagacggctcctggaaagaagagaccggtagagccatcaccccagcgttctccagactcctctacgggcatcggcaagaaaggccagcagcccgcgaaaaagagactcaactttgggcagactggcgactcagagtcagtgcccgaccctcaaccaatcggagaaccccccgcaggcccctctggtctgggatctggtacaatggctgcaggcggtggcgctccaatggcagacaataacgaaggcgccgacggagtgggtagttcctcaggaaattggcattgcgattccacatggctgggcgacagagtcatcaccaccagcacccgaacctgggccctccccacctacaacaaccacctctacaagcaaatctccaacgggacttcgggaggaagcaccaacgacaacacctacttcggctacagcaccccctgggggtattttgactttaacagattccactgccacttctcaccacgtgactggcagcgactcatcaacaacaactggggattccggcccaagagactcaacttcaagctcttcaacatccaggtcaaggaggtcacgcagaatgaaggcaccaagaccatcgccaataaccttaccagcacgattcaggtctttacggactcggaataccagctcccgtacgtcctcggctctgcgcaccagggctgcctgcctccgttcccggcggacgtcttcatgattcctcagtacgggtacctgactctgaacaatggcagtcaggccgtgggccgttcctccttctactgcctggagtactttccttctcaaatgctgagaacgggcaacaactttgagttcagctaccagtttgaggacgtgccttttcacagcagctacgcgcacagccaaagcctggaccggctgatgaaccccctcatcgaccagtacctgtactacctgtctcggactcagtccacgggaggtaccgcaggaactcagcagttgctattttctcaggccgggcctaataacatgtcggctcaggccaaaaactggctacccgggccctgctaccggcagcaacgcgtctccacgacactgtcgcaaaataacaacagcaactttgcctggaccggtgccaccaagtatcatctgaatggcagagactctctggtaaatcccggtgtcgctatggcaacccacaaggacgacgaagagcgattttttccgtccagcggagtcttaatgtttgggaaacagggagctggaaaagacaacgtggactatagcagcgttatgctaaccagtgaggaagaaattaaaaccaccaacccagtggccacagaacagtacggcgtggtggccgataacctgcaacagcaaaacgccgctcctattgtaggggccgtcaacagtcaaggagccttacctggcatggtctggcagaaccgggacgtgtacctgcagggtcctatctgggccaagattcctcacacggacggaaactttcatccctcgccgctgatgggaggctttggactgaaacacccgcctcctcagatcctgattaagaatacacctgttcccgcggatcctccaactaccttcagtcaagctaagctggcgtcgttcatcacgcagtacagcaccggacaggtcagcgtggaaattgaatgggagctgcagaaagaaaacagcaaacgctggaacccagagattcaatacacttccaactactacaaatctacaaatgtggactttgctgttaacacagatggcacttattctgagcctcgccccatcggcacccgttacctcacccgtaatctgtaattgcttgttaatcaataaaccggttgattcgtttcagttgaactttggtctctgcgaagggcgaattcgttt

SEQ ID NO: 3625 - DNA, 2208 bp, Artificial Sequence
  Synthetic polynucleotide
atggctgccgatggttatcttccagattggctcgaggacactctctctgaaggaataagacagtggtggaagctcaaacctggcccaccaccaccaaagcccgcagagcggcataaggacgacagcaggggtcttgtgcttcctgggtacaagtacctcggacccttcaacggactcgacaagggagagccggtcaacgaggcagacgccgcggccctcgagcacgacaaagcctacgaccggcagctcgacagcggagacaacccgtacctcaagtacaaccacgccgacgcggagtttcaggagcgccttaaagaagatacgtcttttgggggcaacctcggacgagcagtcttccaggcgaaaaagagggttcttgaacctctgggcctggttgaggaacctgttaagacggctccgggaaaaaagaggccggtagagcactctcctgtggagccagactcctcctcgggaaccggaaaggcgggccagcagcctgcaagaaaaagattgaattttggtcagactggagacgcagactcagtacctgacccccagcctctcggacagccaccagcagccccctctggtctgggaactaatacgatggctacaggcagtggcgcaccaatggcagacaataacgagggcgccgacggagtgggtaattcctcgggaaattggcattgcgattccacatggatgggcgacagagtcatcaccaccagcacccgaacctgggccctgcccacctacaacaaccacctctacaaacaaatttccagccaatcaggagcctcgaacgacaatcactactttggctacagcaccccttgggggtattttgacttcaacagattccactgccacttttcaccacgtgactggcaaagactcatcaacaacaactggggattccgacccaagagactcaacttcaagctctttaacattcaagtcaaagaggtcacgcagaatgacggtacgacgacgattgccaataaccttaccagcacggttcaggtgtttactgactcggagtaccagctcccgtacgtcctcggctcggcgcatcaaggatgcctcccgccgttcccagcagacgtcttcatggtgccacagtatggatacctcaccctgaacaacgggagtcaggcagtaggacgctcttcattttactgcctggagtactttccttctcagatgctgcgtaccggaaacaactttaccttcagctacacttttgaggacgttcctttccacagcagctacgctcacagccagagtctggaccgtctcatgaatcctctcatcgaccagtacctgtatttcttaagcagaacaaacactccaagtggaaccaccacgcagtcaaggcttcagttttctcaggccggagcgagtgacattcgggaccagtctaggaactggcttcctggaccctgttaccgccagcagcgagtatcaaagacatctgcggataacaacaacagtgaattctcgtggaccggtgctaccaagtaccacctcaatggcagagactctctggtgaatccgggcccggccatggcaagccacaaggacgatgaagaaaagttttttcctcagagcggggttctcatctttgggaagcaaggctcagagaaaacaaatgtggacattgaaaaggtcatgattacagacgaagaggaaatcaggacaaccaatcccgtggctacggagcagtatggttctgtatctaccaacctccagagaggcaacagacaagcagctaccgcagatgtcaacacacaaggcgttcttccaggcatggtctggcaggacagagatgtgtaccttcaggggcccatctgggcaaagattccacacacggacggacattttcacccctctcccctcatgggtggattcggacttaaacaccctcctccacagattctcatcaagaacaccccggtacctgcgaatccttcgaccaccttcagtgcggcaaagtttgcttccttcatcacacagtactccacgggacaggtcagcgtggagatcgagtgggagctgcagaaggaaaacagcaaacgctggaatcccgaaattcagtacacttccaactacaacaagtctgttaatgtggactttactgtggacactaatggcgtgtattcagagcctcgccccattggtaccagattcctgactcgtaatctgtaa

SEQ ID NO: 3626 - protein, 737 aa, Artificial Sequence
  Synthetic polypeptide
MAADGYLPDWLEDNLSEGIREWWDLKPGAPKPKANQQKQDNGRGLVLPGYKYLGPFNGLDKGEPVNAADAAALEHDKAYDQQLQAGDNPYLRYNHADAEFQERLQEDTSFGGNLGRAVFQAKKRVLEPLGLVESPVKTAPGKKRPVEPSPQRSPDSSTGIGKKGQQPAKKRLNFGQTGDSESVPDPQPIGEPPAAPSGVGPNTMAAGGGAPMADNNEGADGVGSSSGNWHCDSTWLGDRVITTSTRTWALPTYNNHLYKQISNGTSGGSTNDNTYFGYSTPWGYFDFNRFHCHFSPRDWQRLINNNWGFRPKRLNFKLFNIQVKEVTQNEGTKTIANNLTSTIQVFTDSEYQLPYVLGSAHQGCLPPFPADVFMIPQYGYLTLNNGSQAVGRSSFYCLEYFPSQMLRTGNNFEFSYNFEDVPFHSSYAHSQSLDRLMNPLIDQYLYYLSRTQSTGGTAGTQQLLFSQAGPNNMSAQAKNWLPGPCYRQQRVSTTLSQNNNSNFAWTGATKYHLNGRDSLVNPGVAMATHKDDEERFFPSSGVLMFGKQGAGKDNVDYSSVMLTSEEEIKTTNPVATEQYGWADNLQQQNAAPIVGAVNSQGALPGMVWQNRDVYLQGPIWAKIPHTDGNFHPSPLMGGFGLKHPPPQILIKNTPVPADPPTTFNQAKLASFITQYSTGQVSVEIEWELQKENSKRWNPEIQYTSNYYKSTNVDFAVNTEGTYSEPRPIGTRYLTRNL

SEQ ID NO: 3627 - DNA, 2211 bp, Artificial Sequence
  Synthetic polynucleotide
atggctgccgatggttatcttccagattggctcgaggacactctctctgaaggaataagacagtggtggaagctcaaacctggcccaccaccaccaaagcccgcagagcggcataaggacgacagcaggggtcttgtgcttcctgggtacaagtacctcggacccttcaacggactcgacaagggagagccggtcaacgaggcagacgccgcggccctcgagcacgacaaagcctacgaccggcagctcgacagcggagacaacccgtacctcaagtacaaccacgccgacgcggagtttcaggagcgccttaaagaagatacgtcttttgggggcaacctcggacgagcagtcttccaggcgaaaaagagggttcttgaacctctgggcctggttgaggaacctgttaagacggctccgggaaaaaagaggccggtagagcactctcctgtggagccagactcctcctcgggaaccggaaaggcgggccagcagcctgcaagaaaaagattgaattttggtcagactggagacgcagactcagtacctgacccccagcctctcggacagccaccagcagccccctctggtctgggaactaatacgatggctacaggcagtggcgcaccaatggcagacaataacgagggcgccgacggagtgggtaattcctcgggaaattggcattgcgattccacatggatgggcgacagagtcatcaccaccagcacccgaacctgggccctgcccacctacaacaaccacctctacaaacaaatttccagcgcttcaacgggagcctcgaacgacaatcactactttggctacagcaccccttgggggtattttgacttcaacagattccactgccacttttcaccacgtgactggcaaagactcatcaacaacaactggggattccgacccaagagactcaacttcaagctctttaacattcaagtcaaagaggtcacgcagaatgacggtacgacgacgattgccaataaccttaccagcacggttcaggtgtttactgactcggagtaccagctcccgtacgtcctcggctcggcgcatcaaggatgcctcccgccgttcccagcagacgtcttcatggtgccacagtatggatacctcaccctgaacaacgggagtcaggcagtaggacgctcttcattttactgcctggagtactttccttctcagatgctgcgtaccggaaacaactttaccttcagctacacttttgaggacgttcctttccacagcagctacgctcacagccagagtctggaccgtctcatgaatcctctcatcgaccagtacctgtattacttgagcagaacaaacactccaagtggaaccaccacgcagtcaaggcttcagttttctcaggccggagcgagtgacattcgggaccagtctaggaactggcttcctggaccctgttaccgccagcagcgagtatcaaagacatctgcggataacaacaacagtgaatactcgtggactggagctaccaagtaccacctcaatggcagagactctctggtgaatccgggcccggccatggcaagccacaaggacgatgaagaaaagttttttcctcagagcggggttctcatctttgggaagcaaggctcagagaaaacaaatgtggacattgaaaaggtcatgattacagacgaagaggaaatcaggacaaccaatcccgtggctacggagcagtatggttctgtatctaccaacctccagagaggcaacagacaagcagctaccgcagatgtcaacacacaaggcgttcttccaggcatggtctggcaggacagagatgtgtaccttcaggggcccatctgggcaaagattccacacacggacggacattttcacccctctcccctcatgggtggattcggacttaaacaccctcctccacagattctcatcaagaacaccccggtacctgcgaatccttcgaccaccttcagtgcggcaaagtttgcttccttcatcacacagtactccacgggacaggtcagcgtggagatcgagtgggagctgcagaaggaaaacagcaaacgctggaatcccgaaattcagtacacttccaactacgccaagtctgtcaatgtggactttactgtggacaataatggcgtgtattcagagcctcgccccattggcaccagatacctgactcgtaatctgtaa

SEQ ID NO: 3628 - DNA, 2208 bp, Artificial Sequence
  Synthetic polynucleotide
atggctgccgatggttatcttccagattggctcgaggacaacctctctgagggcattcgcgagtggtgggacttgaaacctggagccccgaagcccaaagccaaccagcaaaagcaggacgacggccggggtctggtgcttcctggctacaagtacctcggacccttcaacggactcgacaagggggagcccgtcaacgcggcggacgcagcggccctcgagcacgacaaggcctacgaccagcagctcaaagcgggtgacaatccgtacctgcggtataaccacgccgacgccgagtttcaggagcgtctgcaagaagatacgtcttttgggggcaacctcgggcgagcagtcttccaggccaagaagcgggttctcgaacctctcggtctggttgaggaaggcgctaagacggctcctggaaagaaacgtccggtagagcagtcgccacaagagccagactcctcctcgggcatcggcaagacaggccagcagcccgctaaaaagagactcaattttggtcagactggcgactcagagtcagtccccgatccacaacctctcggagaacctccagcaacccccgctgctgtgggacctactacaatggcttcaggcggtggcgcaccaatggcagacaataacgaaggcgccgacggagtgggtaatgcctcaggaaattggcattgcgattccacatggctgggcgacagagtcatcaccaccagcacccgcacctgggccttgcccacctacaataaccacctctacaagcaaatctccagtgcttcaggggccagcaacgacaaccactacttcggctacagcaccccctgggggtattttgatttcaacagattccactgccacttttcaccacgtgactggcagcgactcatcaacaacaattggggattccggcccaagagactcaacttcaaactcttcaacatccaagtcaaggaggtcacgacgaatgatggcgtcacaaccatcgctaataaccttaccagcacggttcaagtcttctcggactcggagtaccagcttccgtacgtcctcggctctgcgcaccagggctgcctccctccgttcccggcggacgtgttcatgattccgcaatacggctacctgacgctcaacaatggcagccaagccgtgggacgttcatccttttactgcctggaatatttcccttctcagatgctgagaacgggcaacaactttaccttcagctacacctttgaggaagtgcctttccacagcagctacgcgcacagccagagcctggaccggctgatgaatcctctcatcgaccaatacctgtattacctgaacagaactcaaaatcagtccggaagtgcccaaaacaaggacttgctgtttagccgtgggtctccagctggcatgtctgttcagcccaaaaactggctacctggaccctgttatcggcagcagcgcgtttctaaaacaaaaacagacaacaacaacagcaattttacctggactggtgcttcaaaatataacctcaatgggcgtgaatccatcatcaaccctggcactgctatggcctcacacaaagacgacgaagacaagttctttcccatgagcggtgtcatgatttttggaaaagagagcgccggagcttcaaacactgcattggacaatgtcatgattacagacgaagaggaaattaaagccactaaccctgtggccaccgaaagatttgggaccgtggcagtcaatttccagagcagcagcacagaccctgcgaccggagatgtgcatgctatgggagcattacctggcatggtgtggcaagatagagacgtgtacctgcagggtcccatttgggccaaaattcctcacacagatggacactttcacccgtctcctcttatgggcggctttggactcaagaacccgcctcctcagatcctcatcaaaaacacgcctgttcctgcgaatcctccggcggagttttcagctacaaagtttgcttcattcatcacccaatactccacaggacaagtgagtgtggaaattgaatgggagctgcagaaagaaaacagcaagcgctggaatcccgaagtgcagtacacatccaattatgcaaaatctgccaacgttgattttactgtggacaacaatggactttatactgagcctcgccccattggcacccgttaccttacccgtcccctgtaa

SEQ ID NO: 3629 - DNA, 2205 bp, Artificial Sequence
  Synthetic polynucleotide
atggctgccgatggttatcttccagattggctcgaggacaacctctdgagggcattcgcgagtggtgggacttgaaacctggagccccgaaacccaaagccaaccagcaaaagcaggacgacggccggggtdggtgcttcctggctacaagtacctcggacccttcaacggactcgacaagggggagcccgtcaacgcggcggatgcagcggccctcgagcacgacaaggcctacgaccagcagctcaaagcgggtgacaatccgtacctgcggtataaccacgccgacgccgagtttcaggagcgtctgcaagaagatacgtcttttgggggcaacctcgggcgagcagtcttccaggccaagaagagggttctcgaaccttttggtdggttgaggaaggtgctaagacggctcctggaaagaaacgtccggtagagcagtcgccacaagagccagactcctcctcgggcattggcaagacaggccagcagcccgctaaaaagagactcaattttggtcagactggcgactcagagtcagtccccgacccacaacctctcggagaacctccagcaacccccgctgctgtgggacctactacaatggcttcaggcggtggcgcaccaatggcagacaataacgaaggcgccgacggagtgggtaatgcctcaggaaattggcattgcgattccacatggctgggcgacagagtcatcaccaccagcacccgaacatgggccttgcccacctataacaaccacctctacaagcaaatctccagtgcttcaggggccagcaacgacaaccactacttcggctacagcaccccctgggggtattttgatttcaacagattccactgccatttctcaccacgtgactggcagcgactcatcaacaacaattggggattccggcccaagagactcaacttcaagctcttcaacatccaagtcaaggaggtcacgacgaatgatggcgtcacgaccatcgctaataaccttaccagcacggttcaagtcttctcggactcggagtaccagttgccgtacgtcctcggctctgcgcaccagggctgcctccctccgttcccggcggacgtgttcatgattccgcagtacggctacctaacgctcaacaatggcagccaggcagtgggacggtcatccttttactgcctggaatatttcccatcgcagatgctgagaacgggcaataactttaccttcagctacaccttcgaggacgtgcctttccacagcagctacgcgcacagccagagcctggaccggctgatgaatcctctcatcgaccagtacctgtattacctgaacagaactcagaatcagtccggaagtgcccaaaacaaggacttgctgtttagccgggggtctccagctggcatgtctgttcagcccaaaaactggctacctggaccctgttaccggcagcagcgcgtttctaaaacaaaaacagacaacaacaacagcaactttacctggactggtgcttcaaaatataaccttaatgggcgtgaatctataatcaaccctggcactgctatggcctcacacaaagacgacaaagacaagttctttcccatgagcggtgtcatgatttttggaaaggagagcgccggagcttcaaacactgcattggacaatgtcatgatcacagacgaagaggaaatcaaagccactaaccccgtggccaccgaaagatttgggactgtggcagtcaatctccagagcagcagcacagaccctgcgaccggagatgtgcatgttatgggagccttacctggaatggtgtggcaagacagagacgtatacctgcagggtcctatttgggccaaaattcctcacacggatggacactttcacccgtctcctctcatgggcggctttggacttaagcacccgcctcctcagatcctcatcaaaaacacgcctgttcctgcgaatcctccggcagagttttcggctacaaagtttgcttcattcatcacccagtattccacaggacaagtgagcgtggagattgaatgggagctgcagaaagaaaacagcaaacgctggaatcccgaagtgcagtatacatctaactatgcaaaatctgccaacgttgatttcactgtggacaacaatggactttatactgagcctcgccccattggcacccgttacctcacccgtcccctgtaa

SEQ ID NO: 3630 - DNA, 2208 bp, Artificial Sequence
  Synthetic polynucleotide
atggctgccgatggttatcttccagattggctcgaggacaacctctctgagggcattcgcgagtggtgggacttgaaacctggagccccgaaacccaaagccaaccagcaaaagcaggacgacggccggggtctggtgcttcctggctacaagtacctcggacccttcaacggactcgacaagggggagcccgtcaacgcggcggatgcagcggccctcgagcacgacaaggcctacgaccagcagctcaaagcgggtgacaatccgtacctgcggtataaccacgccgacgccgagtttcaggagcgtctgcaagaagatacgtcttttgggggcaacctcgggcgagcagtcttccaggccaagaagagggttctcgaaccttttggtctggttgaggaaggtgctaagacggctcctggaaagaaacgtccggtagagcagtcgccacaagagccagactcctcctcgggcattggcaagacaggccagcagcccgctaaaaagagactcaattttggtcagactggcgactcagagtcagtccccgacccacaacctctcggagaacctccagcaacccccgctgctgtgggacctactacaatggcttcaggcggtggcgcaccaatggcagacaataacgaaggcgccgacggagtgggtaatgcctcaggaaattggcattgcgattccacatggctgggcgacagagtcatcaccaccagcacccgaacatgggccttgcccacctataacaaccacctctacaagcaaatctccagtgcttcaggggccagcaacgacaaccactacttcggctacagcaccccctgggggtattttgatttcaacagattccactgccatttctcaccacgtgactggcagcgactcatcaacaacaattggggattccggcccaagagactcaacttcaagctcttcaacatccaagtcaaggaggtcacgacgaatgatggcgtcacgaccatcgctaataaccttaccagcacggttcaagtcttctcggactcggagtaccagttgccgtacgtcctcggctctgcgcaccagggctgcctccctccgttcccggcggacgtgttcatgattccgcagtacggctacctaacgctcaacaatggcagccaggcagtgggacggtcatccttttactgcctggaatatttcccatcgcagatgctgagaacgggcaataactttaccttcagctacaccttcgaggacgtgcctttccacagcagctacgcgcacagccagagcctggaccggctgatgaatcctctcatcgaccagtacctgtattacctgaacagaactcagaatcagtccggaagtgcccaaaacaaggacttgctgtttagccgggggtctccagctggcatgtctgttcagcccaaaaactggctacctggaccctgttaccggcagcagcgcgtttctaaaacaaaaacagacaacaacaacagcaactttacctggactggtgcttcaaaatataaccttaatgggcgtgaatctataatcaaccctggcactgctatggcctcacacaaagacgacgaagacaagttctttcccatgagcggtgtcatgatttttggaaaggagagcgccggagcttcaaacactgcattggacaatgtcatgatcacagacgaagaggaaatcaaagccactaaccccgtggccaccgaaagatttgggactgtggcagtcaatctccagagcagcagcacagaccctgcgaccggagatgtgcatgttatgggagccttacctggaatggtgtggcaagacagagacgtatacctgcagggtcctatttgggccaaaattcctcacacggatggacactttcacccgtctcctctcatgggcggctttggacttaagcacccgcctcctcagatcctcatcaaaaacacgcctgttcctgcgaatcctccggcagagttttcggctacaaagtttgcttcattcatcacccagtattccacaggacaagtgagcgtggagattgaatgggagctgcagaaagaaaacagcaaacgctggaatcccgaagtgcagtatacatctaactatgcaaaatctgccaacgttgatttcactgtggacaacaatggactttatactgagcctcgccccattggcacccgttacctcacccgtcccctgtaa

SEQ ID NO: 3631 - DNA, 2208 bp, Artificial Sequence
  Synthetic polynucleotide
atggctgccgatggttatcttccagattggctcgaggacactctctctgaaggaataagacagtggtggaagctcaaacctggcccaccaccaccaaagcccgcagagcggcataaggacgacagcaggggtcttgtgcttcctgggtacaagtacctcggacccttcaacggactcgacaagggagagccggtcaacgaggcagacgccgcggccctcgagcacgacaaagcctacgaccggcagctcgacagcggagacaacccgtacctcaagtacaaccacgccgacgcggagtttcaggagcgccttaaagaagatacgtcttttgggggcaacctcggacgagcagtcttccaggcgaaaaagagggttcttgaacctctgggcctggttgaggaacctgttaagacggctccgggaaaaaagaggccggtagagcactctcctgtggagccagactcctcctcgggaaccggaaaggcgggccagcagcctgcaagaaaaagattgaattttggtcagactggagacgcagactcagtacctgacccccagcctctcggacagccaccagcagccccctctggtctgggaactaatacgatggctacaggcagtggcgcaccaatggcagacaataacgagggcgccgacggagtgggtaattcctcgggaaattggcattgcgattccacatggatgggcgacagagtcatcaccaccagcacccgaacctgggccctgcccacctacaacaaccacctctacaaacaaatttccagccaatcaggagcctcgaacgacaatcactactttggctacagcaccccttgggggtattttgacttcaacagattccactgccacttttcaccacgtgactggcaaagactcatcaacaacaactggggattccgacccaagagactcaacttcaagctctttaacattcaagtcaaagaggtcacgcagaatgacggtacgacgacgattgccaataaccttaccagcacggttcaggtgtttactgactcggagtaccagctcccgtacgtcctcggctcggcgcatcaaggatgcctcccgccgttcccagcagacgtcttcatggtgccacagtatggatacctcaccctgaacaacgggagtcaggcagtaggacgctcttcattttactgcctggagtactttccttctcagatgctgcgtaccggaaacaactttaccttcagctacacttttgaggacgttcctttccacagcagctacgctcacagccagagtctggaccgtctcatgaatcctctcatcgaccagtacctgtattacttgagcagaacaaacactccaagtggaaccaccacgcagtcaaggcttcagttttctgtggccggacccagtaacatggctgtccagggaaggaactggcttcctggaccctgttaccgccagcagcgagtatcaaagacatctgcggataacaacaacagtgaatttgcttggactggagctaccaagtaccacctcaatggcagagactctctggtgaatccgggcccggccatggcaagccacaaggacgatgaagaaaagttttttcctcagagcggggttctcatctttgggaagcaaggctcagagaaaacaaatgtggacattgaaaaggtcatgattacagacgaagaggaaatcaggacaaccaatcccgtggctacggagcagtatggttctgtatctaccaacctccagcaacagaacacagcaccagctaccgcagatgtcaacacacaaggcgttcttccaggcatggtctggcaggacagagatgtgtaccttcaggggcccatctgggcaaagattccacacacggacggacattttcacccctctcccctcatgggtggattcggacttaaacaccctcctccacagattctcatcaagaacaccccggtacctgcgaatccttcgaccaccttcagtgcggcaaagtttgcttccttcatcacacagtactccacgggacaggtcagcgtggagatcgagtgggagctgcagaaggaaaacagcaaacgctggaatcccgaaattcagtacacttccaactacaacaagtctgttaatgtggactttactgtggacactaatggcgtgtattcagagcctcgccccattggcaccagatacctgactcgtaatctgtaa

SEQ ID NO: 3632 - protein, 735 aa, Artificial Sequence
  Synthetic polypeptide
MAADGYLPDWLEDTLSEGIRQWWKLKPGPPPPKPAERHKDDSRGLVLPGYKYLGPFNGLDKGEPVNEADAAALEHDKAYDRQLDSGDNPYLKYNHADAEFQERLKEDTSFGGNLGRAVFQAKKRVLEPLGLVEEPVKTAPGKKRPVEHSPVEPDSSSGTGKAGQQPARKRLNFGQTGDADSVPDPQPLGQPPAAPSGLGTNTMATGSGAPMADNNEGADGVGNSSGNWHCDSTWMGDRVITTSTRTWALPTYNNHLYKQISSQSGASNDNHYFGYSTPWGYFDFNRFHCHFSPRDWQRLINNNWGFRPKRLNFKLFNIQVKEVTQNDGTTTIANNLTSTVQVFTDSEYQLPYVLGSAHQGCLPPFPADVFMVPQYGYLTLNNGSQAVGRSSFYCLEYFPSQMLRTGNNFTFSYTFEDVPFHSSYAHSQSLDRLMNPLIDQYLYYLSRTNTPSGTTTQSRLQFSVAGPSNMAVQGRNWLPGPCYRQQRVSKTSADNNNSEFAWTGATKYHLNGRDSLVNPGPAMASHKDDEEKFFPQSGVLIFGKQGSEKTNVDIEKVMITDEEEIRTTNPVATEQYGSVSTNLQQQNTAPATADVNTQGVLPGMVWQDRDVYLQGPIWAKIPHTDGHFHPSPLMGGFGLKHPPPQILIKNTPVPANPSTTFSAAKFASFITQYSTGQVSVEIEWELQKENSKRWNPEIQYTSNYNKSVNVDFTVDTNGVYSEPRPIGTRYLTRNL

SEQ ID NO: 3633 - DNA, 2208 bp, Artificial Sequence
  Synthetic polynucleotide
atggctgccgatggttatcttccagattggctcgaggacactctctctgaaggaataagacagtggtggaagctcaaacctggcccaccaccaccaaagcccgcagagcggcataaggacgacagcaggggtcttgtgcttcctgggtacaagtacctcggacccttcaacggactcgacaagggagagccggtcaacgaggcagacgccgcggccctcgagcacgacaaagcctacgaccggcagctcgacagcggagacaacccgtacctcaagtacaaccacgccgacgcggagtttcaggagcgccttaaagaagatacgtcttttgggggcaacctcggacgagcagtcttccaggcgaaaaagaggattcttgaacctctgggcctggttgaggaacctgttaagacggctccgggaaaaaagaggccggtagagcactctcctgcggagccagactcctcctcgggaaccggaaagtcgggccagcagcctgcaagaaaaagattgaattttggtcagactggagacgcagactcagtacctgacccccagcctctcggacagccaccagcagccccctctggtctgggaactaatacgatggcttcaggcagtggcgcaccaatggcagacaataacgagggcgccgacggagtgggtaattcctcgggaaattggcattgcgattccacatggatgggcgacagagtcatcaccaccagcacccgaacctgggccctgcccacctacaacaaccacctctacaaacaaatttccagccaatcaggagcctcgaacgacaatcactactttggctacagcaccccttgggggtattttgacttcaacagattccactgccacttttcaccacgtgactggcaaagactcatcaacaacaactggggattccgacccaagagactcagcttcaagctctttaacattcaagtcaaagaggtcacgcagaatgacggtacgacgacgattgccaataaccttaccagcacggttcaggtgtttactgactcggagtaccagctcccgtacgtcctcggctcggcgcatcaaggatgcctcccgccgttcccagcagacgtcttcatggtgccacagtatggatacctcaccctgaacaacgggagtcaggcagtaggacgctcttcattttactgcctggagtactttccttctcagatgctgcgtaccggaaacaactttaccttcagctacacttttgaggacgttcctttccacagcagctacgctcacagccagagtctggaccgtctcatgaatcctctcatcgaccagtacctgtattacttgagcagaacaaacactccaagtggaaccaccacgatgtcaaggcttcagttttctcaggccggagcgagtgacattcgggaccagtctaggaactggcttcctggaccctgttaccgccagcagcgagtatcaaagacagctgcggataacaacaacagtgattactcgtggactggagctaccaagtaccacctcaatggcagagactctctggtgaatccgggcccggccatggcaagccacaaggacgatgaagaaaagtattttcctcagagcggggttctcatctttgggaagcaagactcaggaaaaacaaatgtggacattgaaaaggtcatgattacagacgaagaggaaatcaggacaaccaatcccgtggctacggagcagtatggttctgtatctaccaacctccagagcggcaacacacaagcagctacctcagatgtcaacacacaaggcgttcttccaggcatggtctggcaggacagagatgtgtaccttcaggggcccatctgggcaaagattccacacacggacggacattttcacccctctcccctcatgggtggattcggacttaaacaccctcctccacagattctcatcaagaacaccccggtacctgcgaatccttcgaccaccttcagtgcggcaaagtttgcttccttcatcacacagtactccacgggacaggtcagcgtggagatcgagtgggagctgcagaaggaaaacagcaaacgctggaatcccgaaattcagtacacttccaactacaacaagtctgttaatgtggactttactgtggacactaatggcgtgtattcagagcctcgccccattggcaccagatacctgactcgtaatctgtaa

SEQ ID NO: 3634 - DNA, 2208 bp, Artificial Sequence
  Synthetic polynucleotide
atggctgccgatggttatcttccagattggctcgaggacactctctctgaaggaataagacagtggtggaagctcaaacctggcccaccaccaccaaagcccgcagagcggcataaggacgacagcaggggtcttgtgcttcctgggtacaagtacctcggacccttcaacggactcgacaagggagagccggtcaacgaggcagacgccgcggccctcgagcacgacaaagcctacgaccggcagctcgacagcggagacaacccgtacctcaagtacaaccacgccgacgcggagtttcaggagcgccttaaagaagatacgtcttttgggggcaacctcggacgagcagtcttccaggcgaaaaagaggattcttgaacctctgggcctggttgaggaacctgttaagacggctccgggaaaaaagaggccggtagagcactctcctgcggagccagactcctcctcgggaaccggaaagtcgggccagcagcctgcaagaaaaagattgaattttggtcagactggagacgcagactcagtacctgacccccagcctctcggacagccaccagcagccccctctggtctgggaactaatacgatggcttcaggcagtggcgcaccaatggcagacaataacgagggcgccgacggagtgggtaattcctcgggaaattggcattgcgattccacatggatgggcgacagagtcatcaccaccagcacccgaacctgggccctgcccacctacaacaaccacctctacaaacaaatttccagccaatcaggagcctcgaacgacaatcactactttggctacagcaccccttgggggtattttgacttcaacagattccactgccacttttcaccacgtgactggcaaagactcatcaacaacaactggggattccgacccaagagactcaacttcaagctctttaacattcaagtcaaagaggtcacgcagaatgacggtacgacgacgattgccaataaccttaccagcacggttcaggtgtttactgactcggagtaccagctcccgtacgtcctcggctcggcgcatcaaggatgcctcccgccgttcccagcagacgtcttcatggtgccacagtatggatacctcaccctgaacaacgggagtcaggcagtaggacgctcttcattttactgcctggagtactttccttctcagatgctgcgtaccggaaacaactttaccttcagctacacttttgaggacgttcctttccacagcagctacgctcacagccagagtctggaccgtctcatgaatcctctcatcgaccagtacctgtattacttgagcagaacaaacactccaagtggaaccaccacgatgtcaaggcttcagttttctcaggccggagcgagtgacattcgggaccagtctaggaactggcttcctggaccctgttaccgccagcagcgagtatcaaagacagctgcggataacaacaacagtgattactcgtggactggagctaccaagtaccacctcaatggcagagactctctggtgaatccgggcccggccatggcaagccacaaggacgatgaagaaaagtattttcctcagagcggggttctcatctttgggaagcaagactcaggaaaaacaaatgtggacattgaaaaggtcatgattacagacgaagaggaaatcaggacaaccaatcccgtggctacggagcagtatggttctgtatctaccaacctccagagcggcaacacacaagcagctacctcagatgtcaacacacaaggcgttcttccaggcatggtctggcaggacagagatgtgtaccttcaggggcccatctgggcaaagattccacacacggacggacattttcacccctctcccctcatgggtggattcggacttaaacaccctcctccacagattctcatcaagaacaccccggtacctgcgaatccttcgaccaccttcagtgcggcaaagtttgcttccttcatcacacagtactccacgggacaggtcagcgtggagatcgagtgggagctgcagaaggaaaacagcaaacgctggaatcccgaaattcagtacacttccaactacaacaagtctgttaatgtggactttactgtggacactaatggcgtgtattcagagcctcgccccattggcaccagatacctgactcgtaatctgtaa

SEQ ID NO: 3635 - protein, 735 aa, Artificial Sequence
  Synthetic polypeptide
MAADGYLPDWLEDTLSEGIRQWWKLKPGPPPPKPAERHKDDSRGLVLPGYKYLGPFNGLDKGEPVNEADAAALEHDKAYDRQLDSGDNPYLKYNHADAEFQERLKEDTSFGGNLGRAVFQAKKRILEPLGLVEEPVKTAPGKKRPVEHSPAEPDSSSGTGKSGQQPARKRLNFGQTGDADSVPDPQPLGQPPAAPSGLGTNTMASGSGAPMADNNEGADGVGNSSGNWHCDSTWMGDRVITTSTRTWALPTYNNHLYKQISSQSGASNDNHYFGYSTPWGYFDFNRFHCHFSPRDWQRLINNNWGFRPKRLNFKLFNIQVKEVTQNDGTTTIANNLTSTVQVFTDSEYQLPYVLGSAHQGCLPPFPADVFMVPQYGYLTLNNGSQAVGRSSFYCLEYFPSQMLRTGNNFTFSYTFEDVPFHSSYAHSQSLDRLMNPLIDQYLYYLSRTNTPSGTTTMSRLQFSQAGASDIRDQSRNWLPGPCYRQQRVSKTAADNNNSDYSWTGATKYHLNGRDSLVNPGPAMASHKDDEEKYFPQSGVLIFGKQDSGKTNVDIEKVMITDEEEIRTTNPVATEQYGSVSTNLQSGNTQAATSDVNTQGVLPGMVWQDRDVYLQGPIWAKIPHTDGHFHPSPLMGGFGLKHPPPQILIKNTPVPANPSTTFSAAKFASFITQYSTGQVSVEIEWELQKENSKRWNPEIQYTSNYNKSVNVDFTVDTNGVYSEPRPIGTRYLTRNL

SEQ ID NO: 3636 - protein, 736 aa, Artificial Sequence
  Synthetic polypeptide
MAADGYLPDWLEDNLSEGIREWWDLKPGAPKPKANQQKQDDGRGLVLPGYKYLGPFNGLDKGEPVNAADAAALEHDKAYDQQLKAGDNPYLRYNHADAEFQERLQEDTSFGGNLGRAVFQAKKRVLEPFGLVEEGAKTAPGKKRPVEQSPQEPDSSSGIGKTGQQPAKKRLNFGQTGDSESVPDPQPLGEPPATPAAVGPTTMASGGGAPMADNNEGADGVGNASGNWHCDSTWLGDRVITTSTRTWALPTYNNHLYKQISSASTGASNDNHYFGYSTPWGYFDFNRFHCHFSPRDWQRLINNNWGFRPKRLNFKLFNIQVKEVTTNDGVTTIANNLTSTVQVFSDSEYQLPYVLGSAHQGCLPPFPADVFMIPQYGYLTLNNGSQAVGRSSFYCLEYFPSQMLRTGNNFTFSYTFEDVPFHSSYAHSQSLDRLMNPLIDQYLYFLNRTQNQSGSAQNKDLLFSRGSPAGMSVQPKNWLPGPCYRQQRVSKTKTDNNNSNFTWTGASKYNLNGRESIINPGTAMASHKDDKDKFFPMSGVMIFGKESAGASNTALDNVMITDEEEIKATNPVATERFGTVAVNLQSSSTDPATGDVHVMGALPGMVWQDRDVYLQGPIWAKIPHTDGHFHPSPLMGGFGLKHPPPQILIKNTPVPANPPAEFSATKFASFITQYSTGQVSVEIEWELQKENSKRWNPEVQYTSNYAKSANVDFTVDNNGLYTEPRPIGTRYLTRPL

SEQ ID NO: 3637 - protein, 747 aa, Artificial Sequence
  Synthetic polypeptide
MAADGYLPDWLEDTLSEGIRQWWKLKPGPPPPKPAERHKDDSRGLVLPGYKYLGPFNGLDKGEPVNEADAAALEHDKAYDRQLDSGDNPYLKYNHADAEFQERLKEDTSFGGNLGRAVFQAKKRVLEPLGLVEEPVKTAPGKKRPVEHSPVEPDSSSGTGKAGQQPARKRLNFGQTGDADSVPDPQPLGQPPAAPSGLGTNTMATGSGAPMADNNEGADGVGNSSGNWHCDSTWMGDRVITTSTRTWALPTYNNHLYKQISSQSGASNDNHYFGYSTPWGYFDFNRFHCHFSPRDWQRLINNNWGFRPKRLNFKLFNIQVKEVTQNDGTTTIANNLTSTVQVFTDSEYQLPYVLGSAHQGCLPPFPADVFMVPQYGYLTLNNGSQAVGRSSFYCLEYFPSQMLRTGNNFTFSYTFEDVPFHSSYAHSQSLDRLMNPLIDQYLYYLSRTNTPSGTTTQSRLQFSQAGASDIRDQSRNWLPGPCYRQQRVSKTSADNNNSEYSWTGATKYHLNGRDSLVNPGPAMASHKDDEEKFFPQSGVLIFGKQGSEKTNVDIEKVMITDEEEIRTTNPVATEQYGSVSTNLQRGNAAAGSTPPPMAARQAATADVNTQGVLPGMVWQDRDVYLQGPIWAKIPHTDGHFHPSPLMGGFGLKHPPPQILIKNTPVPANPSTTFSAAKFASFITQYSTGQVSVEIEWELQKENSKRWNPEIQYTSNYNKSVNVDFTVDTNGVYSEPRPIGTRYLTRNL

SEQ ID NO: 3638 - protein, 747 aa, Artificial Sequence
  Synthetic polypeptide
MAADGYLPDWLEDTLSEGIRQWWKLKPGPPPPKPAERHKDDSRGLVLPGYKYLGPFNGLDKGEPVNEADAAALEHDKAYDRQLDSGDNPYLKYNHADAEFQERLKEDTSFGGNLGRAVFQAKKRVLEPLGLVEEPVKTAPGKKRPVEHSPVEPDSSSGTGKAGQQPARKRLNFGQTGDADSVPDPQPLGQPPAAPSGLGTNTMATGSGAPMADNNEGADGVGNSSGNWHCDSTWMGDRVITTSTRTWALPTYNNHLYKQISSQSGASNDNHYFGYSTPWGYFDFNRFHCHFSPRDWQRLINNNWGFRPKRLNFKLFNIQVKEVTQNDGTTTIANNLTSTVQVFTDSEYQLPYVLGSAHQGCLPPFPADVFMVPQYGYLTLNNGSQAVGRSSFYCLEYFPSQMLRTGNNFTFSYTFEDVPFHSSYAHSQSLDRLMNPLIDQYLYYLSRTNTPSGTTTQSRLQFSQAGASDIRDQSRNWLPGPCYRQQRVSKTSADNNNSEYSWTGATKYHLNGRDSLVNPGPAMASHKDDEEKFFPQSGVLIFGKQGSEKTNVDIEKVMITDEEEIRTTNPVATEQYGSVSTNLQRGNAAAGETRAPLAARQAATADVNTQGVLPGMVWQDRDVYLQGPIWAKIPHTDGHFHPSPLMGGFGLKHPPPQILIKNTPVPANPSTTFSAAKFASFITQYSTGQVSVEIEWELQKENSKRWNPEIQYTSNYNKSVNVDFTVDTNGVYSEPRPIGTRYLTRNL

What is claimed is:

1. An AAV expression cassette comprising sequences encoding:
a first inverted terminal repeat (ITR);
a first promoter;
a first gRNA comprising a first gRNA targeting region and a scaffold region;
a second promoter;
a second gRNA comprising a second gRNA targeting region and a scaffold region;
a third promoter;
a third gRNA comprising a third gRNA targeting region and a scaffold region; and
a second ITR;
wherein the AAV expression cassette is self-complimentary.

2. The AAV expression cassette of claim 1, wherein the expression cassette further comprises a fourth promoter and a fourth gRNA comprising a fourth gRNA targeting region and a scaffold region.

3. The AAV expression cassette of claim 2, wherein the expression cassette further comprises a fifth promoter and a fifth gRNA comprising a fifth gRNA targeting sequence and a scaffold region.

4. The AAV expression cassette of any one of claims 1-3, wherein one or both of the first ITR and the second ITR are isolated or derived from any one of AAV1, AAV2, AAV3, AAV4, AAV5, AAV6, AAV7, AAV8, AAV9, AAV10, AAV11, AAV12, AAVRh74, AAV2i8, AAVRh10, AAV39, AAV43, AAVRh8, avian AAV, bovine AAV, canine AAV, equine AAV, and ovine AAV.

5. The AAV expression cassette of any one of claims 1-4, wherein the one or both of the first ITR and the second ITR are isolated or derived from AAV2.

6. The AAV expression cassette of any one of claims 1-5, wherein the first ITR has a sequence that is at least 95% identical or 100% identical to SEQ ID NO: 1.

7. The AAV expression cassette of any one of claims 1-6, wherein the second ITR has a sequence that is at least 95% identical or 100% identical to the sequence of SEQ ID NO: 2.

8. The AAV expression cassette of any one of claims 1-7, wherein the at least one of the first, second, and third gRNA targeting sequences targets the dystrophin gene.

9. The AAV expression cassette of any one of claims 1-8, wherein the at least two of the first, second, and third gRNA targeting sequences are different.

10. The AAV expression cassette of any one of claims 1-9, wherein the first, second, and third gRNA targeting sequences are the same.

11. The AAV expression cassette of any one of claims 1-10, wherein the at least one of the first, second, and third promoters is the U6 promoter.

12. The AAV expression cassette of claim 11, wherein at least one of the first, second, and third promoters has a sequence at least 95% identical or 100% identical to the sequence of SEQ ID NO: 15.

13. The AAV expression cassette of any one of claims 1-12, wherein the at least one of the first, second, and third promoters is the H1 promoter.

14. The AAV expression cassette of claim 13, wherein at least one of the first, second, and third promoters has a sequence at least 95% identical or 100% identical to the sequence of SEQ ID NO: 16.

15. The AAV expression cassette of any one of claims 1-14, wherein the at least one of the first, second, and third promoters is the 7SK promoter.

16. The AAV expression cassette of claim 15, wherein at least one of the first, second, and third promoters has a sequence at least 95% identical or 100% identical to the sequence of SEQ ID NO: 17.

17. The AAV expression cassette of any one of claims 1-16, wherein the first promoter is the U6 promoter, the second promoter is the H1 promoter, and the third promoter is the 7SK promoter.

18. The AAV expression cassette of claim 17, wherein the first promoter has a sequence at least 95% identical or 100% identical to the sequence of SEQ ID NO: 15; the second promoter has a sequence at least 95% identical or 100% identical to the sequence of SEQ ID NO: 16; and the third promoter has a sequence at least 95% identical or 100% identical to the sequence of SEQ ID NO: 17.

19. The AAV expression cassette of claim 17, wherein the first ITR has a sequence at least 95% identical or 100% identical to the sequence of SEQ ID NO: 1; the first promoter has a sequence at least 95% identical or 100% identical to the sequence of SEQ ID NO: 15; the second promoter has a sequence at least 95% identical or 100% identical to the sequence of SEQ ID NO: 16; the third promoter has a sequence at least 95% identical or 100% identical to the sequence of SEQ ID NO: 17; and the second ITR has a sequence a sequence at least 95% identical or 100% identical to the sequence of SEQ ID NO: 2.

20. An AAV expression cassette comprising sequences encoding:
a first ITR;
a first promoter;
a first gRNA comprising a first gRNA targeting region and a scaffold region;
a second promoter;
a second gRNA comprising a second gRNA targeting sequence and a scaffold region;
a third promoter;
a third gRNA comprising a third gRNA targeting sequence and a scaffold region;
a first stuffer sequence; and
a second ITR;
wherein the stuffer sequence is a 3′ UTR sequence isolated or derived from a gene expressed in muscle.

21. The AAV expression cassette of claim 20, wherein the expression cassette further comprises a fourth promoter and a fourth gRNA comprising a fourth gRNA targeting region and a scaffold region.

22. The AAV expression cassette of claim 21, wherein the expression cassette further comprises a fifth promoter and a fifth gRNA comprising a fifth gRNA targeting sequence and a scaffold region.

23. The AAV expression cassette of any one of claims 20-22, wherein one or both of the first ITR and the second ITR are isolated or derived from any one of AAV1, AAV2, AAV3, AAV4, AAV5, AAV6, AAV7, AAV8, AAV9, AAV10, AAV11, AAV12, AAVRh74, AAV2i8, AAVRh10, AAV39, AAV43, AAVRh8, avian AAV, bovine AAV, canine AAV, equine AAV, and ovine AAV.

24. The AAV expression cassette of claim 23, wherein the one or both of the first ITR and the second ITR are isolated or derived from AAV2.

25. The AAV expression cassette of any one of claims 20-24, wherein the first ITR has a sequence that is at least 95% identical or 100% identical to SEQ ID NO: 3.

26. The AAV expression cassette of any one of claims 20-25, wherein the second ITR has a sequence that is at least 95% identical or 100% identical to the sequence of SEQ ID NO: 2.

27. The AAV expression cassette of any one of claims 20-26, wherein the at least one of the first, second, and third gRNA targeting sequences targets the dystrophin gene.

28. The AAV expression cassette of any one of claims 20-27, wherein the at least two of the first, second, and third gRNA targeting sequences are different.

29. The AAV expression cassette of any one of claims 20-27, wherein the first, second, and third gRNA targeting sequences are the same.

30. The AAV expression cassette of any one of claims 20-29, wherein the at least one of the first, second, and third promoters is the U6 promoter.

31. The AAV expression cassette of claim 30, wherein at least one of the first, second, and third promoters has a sequence at least 95% identical or 100% identical to the sequence of SEQ ID NO: 15.

32. The AAV expression cassette of any one of claims 20-31, wherein the at least one of the first, second, and third promoters is the H1 promoter.

33. The AAV expression cassette of claim 32, wherein at least one of the first, second, and third promoters has a sequence at least 95% identical or 100% identical to the sequence of SEQ ID NO: 16.

34. The AAV expression cassette of any one of claims 20-33, wherein the at least one of the first, second, and third promoters is the 7SK promoter.

35. The AAV expression cassette of claim 34, wherein at least one of the first, second, and third promoters has a sequence at least 95% identical or 100% identical to the sequence of SEQ ID NO: 17.

36. The AAV expression cassette of any one of claims 20-35, wherein the first promoter is the U6 promoter, the second promoter is the H1 promoter, and the third promoter is the 7SK promoter.

37. The AAV expression cassette of claim 36, wherein the first promoter has a sequence at least 95% identical or 100% identical to the sequence of SEQ ID NO: 15; the second promoter has a sequence at least 95% identical or 100% identical to the sequence of SEQ ID NO: 16; and the third promoter has a sequence at least 95% identical or 100% identical to the sequence of SEQ ID NO: 17.

38. The AAV expression cassette of claim 36, wherein the first ITR has a sequence at least 95% identical or 100% identical to the sequence of SEQ ID NO: 3; the first promoter has a sequence at least 95% identical or 100% identical to the sequence of SEQ ID NO: 15; the second promoter has a sequence at least 95% identical or 100% identical to the sequence of SEQ ID NO: 16; the third promoter has a sequence at least 95% identical or 100% identical to the sequence of SEQ ID NO: 17; and the second ITR has a sequence a sequence at least 95% identical or 100% identical to the sequence of SEQ ID NO: 2.

39. A vector comprising the AAV expression cassette of any one of claims 1-38.

40. The vector of claim 39, wherein the vector is a non-viral vector.

41. The vector of claim 40, wherein the vector is a plasmid.

42. The vector of claim 39, wherein the vector is an AAV vector.

43. The vector of claim 42, wherein the AAV vector is a self-complimentary AAV (scAAV).

44. The vector of claim 42 or 43, wherein the AAV vector is selected from one of the following serotypes: AAV1, AAV2, AAV3, AAV4, AAV5, AAV6, AAV7, AAV8, AAV9, AAV10, AAV11, AAV12, AAVRh74, AAV2i8, AAVRh10, AAV39, AAV43, AAVRh8, avian AAV, bovine AAV, canine AAV, equine AAV, and ovine AAV.

45. An AAV particle comprising:
a capsid protein, and
the AAV expression cassette of any one of claims 1-38 encapsidated by the capsid protein.

46. The AAV particle of claim 45, wherein the capsid protein is isolated or derived from a wildtype AAV capsid of the following serotypes: AAV1, AAV2, AAV3, AAV4, AAV5, AAV6, AAV7, AAV8, AAV9, AAV10, AAV11, AAV12, AAVRh.74, AAV2i8, AAVRh.10, AAV39, AAV43, AAVRh.8, avian AAV, bovine AAV, canine AAV, equine AAV, and ovine AAV.

47. A baculovirus vector comprising the AAV expression cassette of any one of claims 1-38.

48. A method of producing an AAV vector comprising contacting a vector comprising the AAV expression cassette of any one of claims 1-38 with an AAV producer cell.

49. The method of claim 48, wherein the AAV producer cell is a mammalian cell.

50. The method of claim 49, wherein the mammalian cell is a HEK293 cell.

51. The method of claim 48, wherein the AAV producer cell is an insect cell.

52. The method of claim 51, wherein the insect cell is a Sf9 cell.

53. A method of correcting a gene defect in a cell, the method comprising contacting an AAV vector comprising the AAV expression cassette of any one of claims 1-38 with the cell.

54. The method of claim 53, wherein the cell is a human cell.

55. The method of claim 53 or 54, wherein the gene defect is a gene defect in the dystrophin gene.

56. The method of any one of claims 53-55, wherein the method also comprises contacting the cell with an AAV vector comprising an expression cassette for a CRISPR nuclease, e.g., a Cas9 nuclease.

57. A method of treating a subject in need thereof comprising administering to the subject an AAV vector comprising the AAV expression cassette of any one of claims 1-38.

58. The method of claim 57, wherein the subject is a human.

59. The method of claim 57 or 58, wherein the subject suffers from Duchenne Muscular Dystrophy (DMD).

60. The method of any one of claims 57-59, wherein the method also comprises administering to the subject an AAV vector comprising an expression cassette for a Cas9 nuclease.
